(19) United States
(12) Patent Application Publication
(10) Pub. No.: US 2005/0197285 A1
(43) Pub. Date: Sep. 8, 2005

(54) Human secreted proteins

(76) Inventors: Craig A. Rosen, Laytonsville, MD (US); Steven M. Ruben, Brookeville, MD (US)

Correspondence Address: HUMAN GENOME SCIENCES INC;INTELLECTUAL PROPERTY DEPT., 14200 SHADY GROVE ROAD, ROCKVILLE, MD, 20850, US

(21) Appl. No.: 10/472,533

(22) PCT Filed: Mar. 19, 2002
(86) PCT No.: PCT/US02/08276

§ 371 Date: Jun. 17, 2004

Related U.S. Application Data
(63) Continuation-in-part of application No. 09/981,876, filed on Oct. 19, 2001.
Application No. 09/981,876 is a division of application No. 09/621,011, filed on Jul. 20, 2000.
Application No. 09/621,011 is a continuation of application No. 09/148,545, filed on Sep. 4, 1998, now Pat. No. 6,590,075.
Application No. 09/148,545 is a continuation-in-part of application No. PCT/US98/04482, filed on Mar. 6, 1998.
(60) Provisional application No. 60/277,340, filed on Mar. 21, 2001.
(60) Provisional application No. 60/306,171, filed on Jul. 19, 2001.
(60) Provisional application No. 60/331,287, filed on Nov. 13, 2001.
(60) Provisional application No. 60/040,162, filed on Mar. 7, 1997.
(60) Provisional application No. 60/040,333, filed on Mar. 7, 1997.
(60) Provisional application No. 60/038,621, filed on Mar. 7, 1997.
(60) Provisional application No. 60/040,161, filed on Mar. 7, 1997.
(60) Provisional application No. 60/040,626, filed on Mar. 7, 1997.
(60) Provisional application No. 60/040,334, filed on Mar. 7, 1997.
(60) Provisional application No. 60/040,336, filed on Mar. 7, 1997.
(60) Provisional application No. 60/040,163, filed on Mar. 7, 1997.
(60) Provisional application No. 60/047,600, filed on May 23, 1997.
(60) Provisional application No. 60/047,615, filed on May 23, 1997.
(60) Provisional application No. 60/047,597, filed on May 23, 1997.
(60) Provisional application No. 60/047,502, filed on May 23, 1997.
(60) Provisional application No. 60/047,633, filed on May 23, 1997.
(60) Provisional application No. 60/047,583, filed on May 23, 1997.
(60) Provisional application No. 60/047,617, filed on May 23, 1997.
(60) Provisional application No. 60/047,618, filed on May 23, 1997.

(51) Int. Cl. A61K 38/17

(52) U.S. Cl. 514/12

(57) ABSTRACT

The present invention relates to human secreted polypeptides, and isolated nucleic acid molecules encoding said polypeptides, useful for diagnosing and treating gastrointestinal diseases, disorders, and/or conditions related thereto. Antibodies that bind these polypeptides and also encompassed by the present invention. Also encompassed by the invention are vectors, host cells, and recombinant and synthetic methods for producing said polynucleotides, polypeptides, and/or antibodies. The invention further encompasses screening methods for identifying agonists and antogonists of polynucleotides and polypeptides of the invention. The present invention further encompasses methods and compositions for inhibiting or enhancing the production and function of the polypeptides of the present invention.

### FIELD OF THE INVENTION

[0001] The present invention relates to human secreted proteins/polypeptides, and isolated nucleic acid molecules encoding said proteins/polypeptides, useful for detecting, preventing, diagnosing, prognosticating, treating, and/or ameliorating gastrointestinal diseases and disorders. Antibodies that bind these polypeptides are also encompassed by the present invention. Also encompassed by the invention are vectors, host cells, and recombinant and synthetic methods for producing said polynucleotides, polypeptides, and/or antibodies. The invention further encompasses screening methods for identifying agonists and antagonists of polynucleotides and polypeptides of the invention. The present invention further encompasses methods and compositions for inhibiting or enhancing the production and function of the polypeptides of the present invention.

### BACKGROUND OF INVENTION

[0002] The human digestive system is a collection of specialized organs and body tissues that prepare food for use by hundreds of millions of body cells. Food when eaten cannot reach ceUs because it cannot pass through the intestinal walls to the bloodstream and, if it could would not be in a useful chemical state. The gastrointestinal system modifies food physically and chemically and disposes of unusable waste. Physical and chemical modification (digestion) depends on exocrine and endocrine secretions and controlled movement of food through the digestive tract.

[0003] The three fundamental processes of the digestive. system are: secretion (e.g., delivery of enzymes, mucus, ions and the like into the lumen, and hormones into blood), absorption (e.g., transport of water, ions and nutrients from the lumen, across the epithelium and into blood), and motility (e.g., contractions of smooth muscle in the wall of the tube that crush, mix and propel its contents). Control of digestive function is achieved through a combination of electrical and hormonal messages which originate either within the digestive system's own nervous and endocrine systems, as well as from the central nervous system and from endocrine organs such as the adrenal gland.

[0004] The digestive system is composed of the digestive or alimentary tube and accessory digestive organs, which include the Mouth (e.g., tongue, taste buds, soft palate pharynx, salivary glands, teeth), Esophagus, Stomach, Liver, Gallbladder, Pancreas, Small Intestine (e.g., duodenum, jejunum, and ileum), and Large Intestine (e.g., caecum).

[0005] Common digestive system disorders including infections, inflammations, ulcers and cancers of the digestive or alimentary tube and above listed accessory digestive organs are described in more detail below.

[0006] Disorders of the Mouth

[0007] The mouth comprises an area from the lips to the front of the tonsils (fauces) at the start of the throat. The mouth contains the gums, teeth, and the tongue, together with salivary glands which secrete fluids that lubricate and begin food digestion as it is chewed. The roof of the mouth consists of the hard palate at the front and the soft palate at the back. The floor of the mouth comprises the tongue (controlled by a number of muscles attached to bones in the neck). At the front and sides of the tongue there are a number of taste buds. These respond to different tastes at different places (e.g., sweet, salty, sour, and bitter). At the back of the tongue there are some swellings which consist of lymphoid tissue. Underneath the tongue there is a midline attachment (frenulum) and the opening of several of the salivary ducts. There are other salivary glands (the parotid glands) lying over the angle of the jaw with a duct opening to the inside of the cheek at about the level of the second molar tooth.

[0008] Diseases and disorders of the mouth are vary greatly in manifested symptoms, frequencies, severities, and causes. Accordingly, diseases and disorders of the mouth may be caused or initiated by viruses, bacteria, genetics (e.g. autoimmune disorders), physical or chemical trauma, etc. For example, diseases and disorders of the mouth include canker sores (aphthous ulcers), herpetic stomatitis leukoplakia, gingivostomatitis, oral cancer, oral lichen lanus, oral thrush, histoplasmosis, salivary gland infections, glossitis, Hand, Foot and Mouth disease, salivary duct stones, mumps, etc.

[0009] Disorders of the Esophagus

[0010] Disorders of the Esophagus include dysphagia (e.g., difficulty in swallowing) and odynophagia (e.g., difficulty in swallowing accompanied by pain). Inflammatory disorders of the esophagus result from a variety of causes; for example, ingestion of noxious materials (e.g., corrosive esophagitis), lodgment of foreign bodies, or a complex of events associated with reflux of gastric contents from the stomach into the lower esophagus (e.g., peptic esophagitis).

[0011] Disorders of the motility of the esophagus tend to be either precipitated or aggravated at times of nervous stress. A disorder commonly due to obesity is gastric reflux. Persisting reflux of gastric contents with acid and digesting enzymes leads to chemical inflammation of the lining of the esophagus and ultimately to (peptic) ulceration. If inadequately treated, the process leads to submucosal fibrosis and stricturing, and, besides the symptoms of heartburn and regurgitation, the patient experiences pain on eating and swallowing.

[0012] Further disorders of the esophagus include the formation of diverticula. A serious injury to the esophagus is spontaneous rupture. It can occur in patients who have been vomiting or retching and in debilitated elderly persons with chronic lung disease. A rupture of this type confined to the mucosa only at the junction of the linings of the esophagus and stomach is called a Mallory-Weiss lesion.

[0013] Benign tumors of the esophagus originate in the submucosal tissues and principally are leiomyomas (tumors composed of smooth muscle tissue) or lipomas (tumors composed of adipose, or fat, tissues). Malignant tumors are either epidermal cancers, made up of unorganized aggregates of cells, or adenocarcinomas, in which there are gland-like formations. Cancers arising from squamous tissues are found at all levels of the organ, whereas adenocarcinomas are more common at the lower end where a number of glands of gastric origin are normally present. The prognosis is poor because diagnosis is difficult and the tumor has usually been growing for one or two years before symptoms are apparent.

[0014] Disorders of the Stomach

[0015] Any disorder that affects the power of coordination of the stomach muscles is capable of producing symptoms ranging from those that are mildly unpleasant (e.g., anorexia and nausea) to others that are life-threatening. The intrinsic muscles of the stomach are innervated by branches of the vagus nerves, which travel along the esophagus from their point of emergence in the brain stem. Severing these nerves or altering their function by the use of anticholinergic medication may produce temporary or more prolonged change in the ability of the stomach to empty itself. Gastric retention may result from the degeneration of the nerves to the stomach that can result from diabetes merintus. Obstruction due to scarring in the area of the gastric outlet, or to tumors encroaching on the lumen, causes the stomach to fill up with its own secretions as well as with partially digested food. In these circumstances, vomiting leads to dehydration and to electrolyte losses, which threaten life if not corrected.

[0016] Disorders of the stomach include ulcerative diseases, which involve mucosal breakdown either confined to the superficial layers of the mucosa (e.g., an erosion) or extending through the intrinsic layer of muscle of the mucosa into the tissues below (e.g., an ulcer). The circumstances that contribute to mucosal injury and ulcer formation include physical and chemical trauma that result from hot fluids and food, aspirin and other drugs, irritating spices, and pickling fluids. In addition, genetic factors are involved in the development of ulcers. The complications of peptic ulcers are hemorrhage, perforation, and obstruction of the outlet of the stomach (pyloric stenosis) by scarring of the duodenal bulb or of the pyloric channel. A diffuse inflammation of the stomach lining, gastritis, is usually an acute process caused by contaminated food, alcohol abuse, or by bacterial- or viral-induced inflammation of the gastrointestinal tract (gastroenteritis). The other form of gastritis is gastric atrophy, in which the thickness of the mucosa is diminished. Diffuse gastric atrophy leads to partial loss of the glands and secreting cells throughout the stomach and may be associated with ironeficiency anemia.

[0017] Malignant tumors of the stomach are common and are probably a result of both genetic and environmental factors. Gastric cancer affects men more often than women and accounts for about 20 percent of all deaths from cancers of the gastrointestinal tract in the United States. Other. malignant tumors that involve the stomach are tumors ordinarily made up of lymphoid and connective tissue. Benign tumors, especially leiomyomas, are common and may, when large, cause massive hemorrhage. Polyps of the stomach are not common except in the presence of gastric atrophy.

[0018] Disorders of the Duodenum and Small Intestine

[0019] Primary cancer of the duodenum is an infrequent disease, however, benign tumors of the duodenum, particularly polyps and carcinoids, are more frequent. Cancers of the common bile duct or of the pancreas are important causes of death. A common disorder of the small intestine, distension, is caused by lack of coordination of the inner circular and outer longitudinal muscular layers of the intestinal wall which usually results in an accumulation of excess contents in the lumen. The most common cause of disturbed motility in the small intestine is food that contains an unsuitable additive, organism, or component. One of the most serious problems in small intestine are motor disturbances which arise from an intestinal obstruction that results from an actual encroachment on the bowel by an adhesive band or from an internal block produced by a tumor or gallstone. In addition, as profound an obstruction results when a portion of the intestine undergoes partial necrosis, or death, from failure of its blood supply.

[0020] The extremely common disorder known as the irritable bowel syndrome is probably due to a disturbance of the motility of the whole intestinal tract. The symptoms vary from watery diarrhea to constipation and the passage of stools with difficulty. When the colon is involved, an excess of mucus is often observed in the stools. Occasionally the irritable bowel syndrome may be due to an allergy to a particular foodstuff. The syndrome may develop following an infection such as bacillary dysentery, after which the small intestine remains irritable for many months.

[0021] A further disorder, malabsorption occurs when the small intestine is unable to transport properly broken down products of digestive materials from the lumen of the intestine into the lymphatics or mesenteric veins, where they are distributed to the rest of the body. Defects in transport occur either because the absorptive cells of the intestine lack certain enzymes, whether by birth defect or by acquired disease, or because they are hindered in their work by other disease processes that infiltrate the tissues, disturb motility, permit bacteria to overpopulate the bowel, or block the pathways over which transport normally proceeds. A malabsorption disorder of unknown cause, tropical sprue, is associated with partial atrophy of the mucosa of the small intestine. Disorders of the small intestine also include bacterial and parasitic infections.

[0022] Appendicitis is an inflammation of the vermiforin appendix that may be caused by infection or partial or total obstruction. Chronic inflammations of the small intestine include tuberculosis and regional enteritis (Crohn's disease). Celiac disease causes damage to the mucosa of the small intestine, though it is not clear whether it is caused by an immune reaction, or an inability to break down a toxic protein, gluten, to smaller peptide fractions. Studies of the immune function of those with celiac disease suggest that at least a major part of the process is a delayed hypersensitivity reaction and that the morphological changes are correlated with the presence of circulating antibodies to gluten. The mucosal reaction results in progressive atrophy, with dwarfing, if not complete disappearance, of the microvilli and villi that line the intestinal tract.

[0023] Disorders of the Large Iytestine

[0024] A wide variety of diseases and disorders occur in the large intestine. A disease that is analogous to achalasia of the esophagus is an idiopathic condition called aganglionic megacolon, or Hirschsprung's disease. It is characterized by the absence of ganglion cells and normal nerve fibres from the distal (or lower) portion of the large intestine, which results in reduced neuromuscular transmission and ceased peristalsis. The entire colon slowly becomes more and more distended and thick-walled. Abscesses in the perianal area are common complicating features of many diseases and disorders of the large intestine. Fungal and bacterial infections are also common causes of large intestine disorders.

[0025] The most common form of chronic colitis, ulcerative colitis, is idiopathic. It varies from a mild inflammation of the mucosa of the rectum, giving rise to excessive mucus and some spotting of blood in the stools, to a severe, sudden, intense illness, with destruction of a large part of the colonic mucosa, considerable blood loss, toxemia and, less commonly, perforation. The most common variety affects only the rectum and sigmoid colon and is characterized by diarrhea and the passage of mucus. Apart from the greater tendency for fistulas to form and for the wall of the intestine to thicken until the channel is obstructed, Crohn's disease is distinguishable from ulcerative colitis by microscopic findings. In Crohn's disease, the maximum damage occurs beneath the mucosa, and lymphoid conglomerations, known as granulomata, are formed in the submucosa. Crohn's disease attacks the perianal tissues more often than does ulcerative colitis. Although these two diseases are not common, they are disabling.

[0026] Tumors of the colon are usually polyps or cancers. A peculiar form of polyp is the villous adenoma, often a slowly growing, fernlike structure that spreads along the surface of the colon for some distance. Cancers compress the colonic lumen to produce obstruction, they attach to neighbouring structures to produce pain, and they perforate to give rise to peritonitis. Cancers also may metastasize to distant organs before local symptoms appear.

[0027] Anorectal disorders related to defecation are more common in the Western world than elsewhere. These disorders usually take the form of fissures (cuts or cracks in the skin or mucous membrane) at the junction of the anal mucous membrane with the slin between the thighs. Anal fistulas sometimes occur as complications of serious bowel disease, as in tuberculosis or Crohn's disease of the bowel, or in certain parasitic diseases. A more general disorder is the enlargement of veins of the rectum and anus to form external or internal hemorrhoids. Hemorrhoids protrude, are associated with anal itching and pain, and bleed, especially when they come in contact with hard stools.

[0028] Disorders of the Liver

[0029] A variety of agents, including viruses, drugs, environmental pollutants, genetic disorders, and systemic diseases, can affect the liver. The resulting disorders usually affect one of the three functional components of the liver: the hepatocyte (liver cell) itself, the bile secretory (cholangiolar) apparatus, or the blood vascular system. Most acute liver diseases are self-limited, and liver functioning returns to normal once the causes are removed or eliminated. In some cases, however, the acute disease process destroys massive areas of liver tissue in a short time, leading to extensive death (necrosis) of hepatic cells and often to death of the patient. Hepatitis may result from viral infections or toxic damage from drugs or poisons. When acute hepatitis lasts for six months or more, a slow but progressive destruction of the surrounding liver cells and bile ducts occurs, a stage called chronic active hepatitis. If hepatocellular damage is severe enough to destroy entire acini (clusters of lobules), they are often replaced with fibrous scar tissue. Bile canaliculi and hepatocytes regenerate in an irregular fashion adjacent to the scar tissue and result in a chronic condition called cirrhosis of the liver. Where inflammatory activity continues after the onset of cirrhosis, the disorderly regeneration of hepatocytes and cholangioles may lead to the development of hepatocellular or cholangiolar cancer.

[0030] Although a number of viruses affect the liver, including the cytomegalovirus of infancy and childhood and the Epstein-Barr virus of infectious mononucleosis, there are three distinctive transmissible viruses that are specifically known to cause acute damage to liver cells: hepatitis virus A (HAV), hepatitis virus B (HBV), and hepatitis virus non-A, non-B (NANB). The symptoms characteristic of the acute hepatitis caused by the HAV, HBV, and NANB viruses are essentially indistinguishable from one another.

[0031] Acute hepatitis also may be caused by the overconsumnption of alcohol or other poisons, such as comnmercial solvents (e.g., carbon tetrachloride), acetaminophen, and certain fungi. Such agents are believed to cause hepatitis when the formation of their toxic intermediate metabolites in the liver cell (phase I reactions) is beyond the capacity of the hepatocyte to conjugate, or join them with another substance for detoxification (phase II reactions) and excretion. Acute canalicular (cholestatic) hepatitis is most commonly caused by certain drugs, such as chlorpromazine, that lead to idiosyncratic reactions or, at times, by hepatitis viruses. Acute congestive liver disease usually results from the sudderi engorgement of the liver by fluids after congestive heart failure.

[0032] A prominent autoimmune liver disease is Wilson's disease, which is caused by abnormal deposits of large amounts of copper in the liver. Granulomatous hepatitis, a condition in which localized areas of inflammation (granulomas) appear in any portion of the liver lobule, is a type of inflammatory disorder associated with many systemic diseases, including tuberculosis, sarcoidosis, schistosomiasis, and certain drug reactions. Granulomatous hepatitis rarely leads to serious interference with hepatic function, although it is often chronic. The end result of many forms of chronic liver injury is cirrhosis, or scarring of liver tissue in reponse to previous acinar necrosis and irregular regeneration of liver nodules and bile ducts.

[0033] Primary biliary cirrhosis, a widespread, though uncommon, autoimnune inflammatory disease of bile ducts, is a disorder primarily affecting middle-aged and older women. Secondary biliary cirrhosis results from chronic obstruction or recurrent infection in the extrahepatic bile ducts caused by strictures, gallstones, or tumors. Infestation of the biliary tract with a liver fluke, Clonorchis sinensis, is a cause of secondary biliary cirrhosis in Asia.

[0034] Portal hypertension, the increased pressure in the portal vein and its tributaries that is the result of impediments to venous flow into the liver, is brought about by the scarring characteristic of the cirrhotic process. The increased pressure causes feeders of the portal vein to distend markedly, producing varices, or dilations of the veins. When varices are located in superficial tissues, they may rupture and bleed profusely. Two such locations are the lower esophagus and the perianal region. The accumulation of fluid in the abdominal cavity, or ascites, is related to portal hypertension, significant reduction in serum albumin, and renal retention of sodiun When albumin levels in blood are lower than normal, there is a mnarked reduction in the force that holds plasma water within the blood vessels and normally resists the effects of the intravascular pressure. The resulting increase in intravascular pressure, coupled with the increased internal pressure caused by the portal venous obstruction in the liver, leads to massive losses of plasma water into the abdominal cavity. The associated reduction of blood flow to the kidneys causes increased elaboration of the hormone aldosterone, which, in turn, causes the retention of sodium and water and a reduction in urinary output. In addition, because the movement of intestinal lymph into the liver is blocked by the cirrhotic process in the liver, the backflow of this fluid into the abdominal cavity is greatly increased. A progressive reduction in kidney function that often occurs in persons with advanced acute or chronic liver disease, hepatorenal syndrome, probably results from an inadequate perfusion of blood through the cortical (outer) portions of the kidneys, where most removal of waste products occurs. With advanced hepatocytic dysfunction, a spasm of blood vessels in the renal cortex can occur, often with good blood flow to the rest of the kidney. This spasm results in progressive failure in kidney function and often leads to death.

[0035] Although not uncommon, cancer originating in the liver, usually in hepatocytes and less frequently in cells of bile duct origin, is rare in the West and is almost always associated with active cirrhosis, particularly the form found in patients with chronic hepatitis. Long exposure to certain environmental poisons, such as vinyl chloride or carbon tetrachloride, has also been shown to lead to hepatic cancer. Cancers arising elsewhere in the body, particularly in abdominal organs, lungs, and lymphoid tissue, commonly lead to metastatic cancer in the liver and are by far the most frequent type of hepatic malignancy. Various benign types of tumors and cysts arise from certain components of the liver, such as the hepatocytes (adenomas) or blood vessels (hemangiomas). While the cause of these lesions is not always clear, hepatic adenomas are associated with the prolonged use of female sex hormones (estrogens). Benign cysts in the liver may occur as congenital defects or as the result of infections from infestation of the dog tapeworm (Echinococcus granulosus). Abscesses on the liver result from the spread of infection from the biliary tract or from other parts of the body, especially the appendix and the pelvic organs. Specific liver abscesses also result from infections with the intestinal parasite Entamoeba histolytica.

[0036] Disorders of the Biliary Tract

[0037] Cholelithiasis, or the formation of gallstones in the gallbladder, is the most common disease of the biliary tract. There are three types of Gallstones: stones containing primarily calcium bilirubinate (pigment stones); stones containing 25 percent or more of cholesterol; and stones composed of variable mixtures of both bilirubin and cholesterol (mixed gallstones). Pigment stones are the result of an increased amount of bilirubin in the liver (due to hemolytic disease) and the consequent secretion into the biliary tract of increased amounts of the water-soluble conjugate, bilirubin diglucuronide, a pigment that is normally secreted in the urine. Cholesterol and mixed cholesterol-bilirubinate stones occur when the proportion of cholesterol in bile exceeds the capacity of bile acids and lecithin to contain the total amount of cholesterol in micellar colloidal solution. Postcholecystectomy syndrome comprises painful attacks, often resembling preoperative symptoms, that occasionally occur following the surgical removal of gallstones and the gallbladder. These attacks may be related to intermittent muscular spasms of the sphincter of Oddi or of the bile ducts.

[0038] Cancer of the biliary tract is rare but may occur in almost any area, including the gallbladder, the hepatic ducts, the common bile duct, or the ampulla of Vater. In cancer of the bile duct, congenital cysts and parasitic infections, such as liver flukes, seem to lead to increased risks. Persons with extensive chronic ulcerative colitis also show a greater than normal incidence of bile duct carcinoma.

[0039] Jaundice, or yellowing of the skin, scleras, and mucous membranes, occurs whenever the level of bilirubin in the blood is significantly above normal. This condition is evident in three different types of disorders including, unconjugated, or hemolytic, jaundice; hepatocellular jaundice; and cholestatic, or obstructive jaundice. Unconjugated jaundice results when the amount of bilirubin produced from hemoglobin by the destruction of red blood cells or muscle tissue (myoglobin) overwhelms the normal capacity of the liver to transport it or when the ability of the liver to conjugate normal amounts of billrubin into billrubin diglucuronide is significantly reduced by inadequate intracellular transport or enzyme systems. Hepatocellular jaundice arises when liver cells are damaged so severely that their ability to transport bilirubin diglucuronide into the biliary system is reduced, allowing some of this yellow pigment to regurgitate into the bloodstream. Cholestatic jaundice, occurs when essentially normal liver cells are unable to transport bilirubin either through the hepatocytic-bile capillary membrane, because of damage in that area, or through the biliary tract, because of anatomical obstructions (e.g., atresias, gallstones, cancer).

[0040] Disorders of the Pancreas

[0041] Inflammation of the pancreas, or pancreatitis, is probably the most common disease of this organ. The disorder may be confined to either singular or repeated acute episodes, or it may become a chronic disease. There are many factors associated with the onset of pancreatitis, including direct injury, certain drugs, viral infections, heredity, hyperlipidernia (increased levels of blood fats), and congenital derangements of the ductal system. Localized, severe abdominal and midback pain resulting from enzyme leakage, tissue damage, and nerve irritation is the most common symptom of acute pancreatitis. In severe cases, respiratory failure, shock, and even death may occur. Chronic pancreatitis rarely follows repeated acute attacks. It seems instead to be a separate disorder that results in mucus plugs and precipitation of calcium salts in the snaller pancreatic ducts. Mucous production and plugging of the pancreas in Cystic fibrosis patients almost invariably causes destruction and scarring of the acinar tissue, usually without damaging the islets of Langerhans. A sirnilar process in the hepatic biliary system produces foci of fibrosis and bile duct proliferation, a singular form of cirrhosis.

[0042] The discovery of new human digestive system associated polynucleotides, the polypeptides encoded by them, and antibodies that immunospecifically bind these polypeptides, satisfies a need in the art by providing new compositions which are useful in detecting, preventing, diagnosing, prognosticating, treating, and/or ameliorating diseases and disorders of the digestive system, including, but not limited to, dysphagia, odynophagia, congenital disorders of the esophagus, gastric reflux, diverticula, Mallory-Weiss lesions, leiomyomas of the esophagus, lipoma, anorexia, nausea, ulcerative disease, pyloric stenosis, gastroenteritis, gastritis, gastric atropy, gastric cancer, benign tumors of the duodenum (e.g., polyps and carcinoids), pancreatic cancer, cancer of the bile duct, distension, irritable bowel syndrome, malabsorption, congenital disorders of the small intestine (e.g., Meckel's diverticulum, multiple diverticula), bacterial and parasitic infection (e.g., traveler's diarrhea, typhoid, paratyphoid, cholera, roundworms, tapeworms, amoebae, hookworms, strongyloides, threadworms, and blood flukes), megacolon (e.g., Hirschsprung's disease, aganglionic megacolon, acquired megacolon), colitis (e.g., due to bacterial, fungal, or parasitic infection, ulcerative colitis), tumors of the colon (e.g., polyps or cancers), anorectal disorders (e.g., anal fistulas, hemorrhoids, hepatitis (e.g., acute, chronic, persistent hepatitis, viral (for example, hepatitis caused by hepatitis virus A (HAV), hepatitis virus B (HBV), and hepatitis virus non-A, non-B (NANB) infection), congenital disorders of the liver (e.g., Wilson's disease, hemochromatosis, cystic fibrosis, biliary atresia, and alpha1-antitrypsin deficiency), cirrhosis, portal hypertension, cholelithiasis, cancer of the biliary tract, jaundice (e.g., unconjugated, hemolytic, hepatocellular, cholestatic, or obstructive jaundice).

[0043] The discovery of new human gastrointestinal-associated polynucleotides, the polypeptides encoded by them, and antibodies that immunospecifically bind these polypeptides, satisfies a need in the art by providing new compositions which are useful in detecting, preventing, diagnosing, prognosticating, treating, and/or ameliorating gastrointestinal-specific diseases and disorders described in more detail below.

### SUMMARY OF INVENTION

[0044] The present invention encompasses human secreted proteins/polypeptides, and isolated nucleic acid molecules encoding said proteins/polypeptides, useful for detecting, preventing, diagnosing, prognosticating, treating, and/or ameliorating gastrointestinal diseases and disorders. Antibodies that bind these polypeptides are also encompassed by the present invention; as are vectors, host cells, and recombinant and synthetic methods for producing said polynucleotides, polypeptides, and/or antibodies. The invention further encompasses screening methods for identifying agonists and antagonists of polynucleotides and polypeptides of the invention. The present invention also encompasses methods and compositions for inhibiting or enhancing the production and function of the polypeptides of the present invention.

### DETAILED DESCRIPTION

Polynucleotides and Polypeptides of the Invention

[0045] Description of Table 1A

[0046] Table 1A summarizes information concerning certain polypnucleotides and polypeptides of the invention. The first column provides the gene number in the application for each clone identifier. The second column provides a unique clone identifier, “Clone ID:”, for a cDNA clone related to each contig sequence disclosed in Table 1A. Third column, the cDNA Clones identified in the second column were deposited as indicated in the third column (i.e. by ATCC Deposit No:Z and deposit date). Some of the deposits contain multiple different clones corresponding to the same gene. In the fourth column, “Vector” refers to the type of vector contained in the corresponding cDNA Clone identified in the second column. In the fifth column, the nucleotide sequence identified as “NT SEQ ID NO:X” was assembled from partially homologous (“overlapping”) sequences obtained from the corresponding cDNA clone identified in the second column and, in some cases, from additional related cDNA clones. The overlapping sequences were assembled into a single contiguous sequence of high redundancy (usually three to five overlapping sequences at each nucleotide position), resulting in a final sequence identified as SEQ ID NO:X. In the sixth column, “Total NT Seq.” refers to the total number of nucleotides in the contig sequence identified as SEQ ID NO:X.” The deposited clone may contain all or most of these sequences, reflected by the nucleotide position indicated as “5′ NT of Clone Seq.” (seventh column) and the “3′ NT of Clone Seq.” (eighth column) of SEQ ID NO:X. In the ninth column, the nucleotide position of SEQ ID NO:X of the putative start codon (methionine) is identified as “5′ NT of Start Codon.” Similarly, in column ten, the nucleotide position of SEQ ID NO:X of the predicted signal sequence is identified as “5′ NT of First AA of Signal Pep.” In the eleventh column, the translated amino acid sequence, beginning with the methionine, is identified as “AA SEQ ID NO:Y,” although other reading frames can also be routinely translated using known molecular biology techniques. The polypeptides produced by these alternative open reading frames are specifically contemplated by the present invention.

[0047] In the twelfth and thirteenth columns of Table 1A, the first and last amino acid position of SEQ ID NO:Y of the predicted signal peptide is identified as “First AA of Sig Pep” and “Last AA of Sig Pep.” In the fourteenth column, the predicted first amino acid position of SEQ ID NO:Y of the secreted portion is identified as “Predicted First AA of Secreted Portion”. The amino acid position of SEQ ID NO:Y of the last amino acid encoded by the open reading frame is identified in the fifteenth column as “Last AA of ORF”.

[0048] SEQ ID NO:X (where X may be any of the polynucleotide sequences disclosed in the sequence listing) and the translated SEQ ID NO:Y (where Y may be any of the polypeptide sequences disclosed in the sequence listing) are sufficiently accurate and otherwise suitable for a variety of uses well known in the art and described further below. For instance, SEQ ID NO:X is useful for designing nucleic acid hybridization probes that will detect nucleic acid sequences contained in SEQ ID NO:X or the cDNA contained in the deposited clone. These probes will also hybridize to nucleic acid molecules in biological samples, thereby enabling a variety of forensic and diagnostic methods of the invention. Similarly, polypeptides identified from SEQ ID NO:Y may be used, for example, to generate antibodies which bind specifically to proteins containing the polypeptides and the secreted proteins encoded by the cDNA clones identified in Table 1A and/or elsewhere herein

[0049] Nevertheless, DNA sequences generated by sequencing reactions can contain sequencing errors. The errors exist as misidentified nucleotides, or as insertions or deletions of nucleotides in the generated DNA sequence. The erroneously inserted or deleted nucleotides cause frame shifts in the reading frames of the predicted amino acid sequence. In these cases, the predicted amino acid sequence diverges from the actual amino acid sequence, even though the generated DNA sequence may be greater than 99.9% identical to the actual DNA sequence (for example, one base insertion or deletion in an open reading frame of over 1000 bases).

[0050] Accordingly, for those applications requiring precision in the nucleotide sequence or the amino acid sequence, the present invention provides not only the generated nucleotide sequence identified as SEQ ID NO:X, and the predicted translated amino acid sequence identified as SEQ ID NO:Y, but also a sample of plasmid DNA containing a human cDNA of the invention deposited with the ATCC, as set forth in Table 1A. The nucleotide sequence of each deposited plasmid can readily be determined by sequencing the deposited plasrnid in accordance with known methods

[0051] The predicted amino acid sequence can then be verified from such deposits. Moreover, the amino acid sequence of the protein encoded by a particular plasmid can also be directly determined by, peptide sequencing or by expressing the protein in a suitable host cell containing the deposited human cDNA, collecting the protein, and determining its sequence.

[0052] Also provided in Table 1A is the name of the vector which contains the cDNA plasmid. Each vector is routinely used in the art. The following additional information is provided for convenience.

[0053] Vectors Lambda Zap (U.S. Pat. Nos. 5,128,256 and 5,286,636), Uni-Zap XR (U.S. Pat. Nos. 5,128,256 and 5,286,636), Zap Express (U.S. Pat. Nos. 5,128,256 and 5,286,636), pBluescript (pBS) (Short, J. M. et al., Nucleic Acids Res. 16:7583-7600 (1988); Alting-Mees, M. A. and Short, J. M., Nucleic Acids Res. 17:9494 (1989)) and pBK (Alting-Mees, M. A. et al., Strategies 5:58-61 (1992)) are commercially available from Stratagene Cloning Systems, Inc., 11011 N. Torrey Pines Road, La Jolla, Calif., 92037. pBS contains an ampicillin resistance gene and pBK contains a neomycin resistance gene. Phagemid pBS may be excised from the Lambda Zap and Uni-Zap XR vectors, and phagemid pBK may be excised from the Zap Express vector. Both phagemids may be transformed into E. coli strain XL-1 Blue, also available from Stratagene

[0054] Vectors pSport1, pCMVSport 1.0, pCMVSport 2.0 and pCMVSport 3.0, were obtained from Life Technologies, Inc., P. O. Box 6009, Gaithersburg, Md. 20897. All Sport vectors contain an ampicillin resistance gene and may be transformed into E. coli strain DH10B, also available from Life Technologies. See, for instance, Gruber, C. E., et al., Focus 15:59 (1993). Vector lafmid BA (Bento Soares, Columbia University, New York, N.Y.) contains an ampicillin resistance gene and can be transformed into E. coli strain XL-1 Blue. Vector pCR®2.1, which is available from Invitrogen, 1600 Faraday Avenue, Carlsbad, Calif. 92008, contains an ampicillin resistance gene and may be transformed into E. coli strain DH10B, available from Life Technologies. See, for instance, Clark, J. M., Nuc. Acids Res. 16:9677-9686 (1988) and Mead, D. et al, Bio/Technology 9: (1991).

[0055] The present invention also relates to the genes corresponding to SEQ ID NO:X, SEQ ID NO:Y, and/or a deposited cDNA (cDNA Clone ID). The corresponding gene can be isolated in accordance with known methods using the sequence information disclosed herein. Such methods include, but are not limited to, preparing probes or primers from the disclosed sequence and identifying or amplifying the corresponding gene from appropriate sources of genomic material.

[0056] Also provided in the present invention are allelic variants, orthologs, and/or species homologs. Procedures known in the art can be used to obtain full-length genes, allelic variants, splice variants, full-length coding portions, orthologs, and/or species homologs of genes corresponding to SEQ ID NO:X and SEQ ID NO:Y using information from the sequences disclosed herein or the clones deposited with the ATCC. For example, allelic variants and/or species homologs may be isolated and identified by making suitable probes or primers from the sequences provided herein and screening a suitable nucleic acid source for allelic variants and/or the desired homologue.

[0057] The present invention provides a polynucleotide comprising, or alternatively consisting of, the nucleic acid sequence of SEQ ID NO:X and/or a cDNA contained in ATCC Deposit No.Z. The present invention also provides a polypeptide comprising, or alternatively, consisting of, the polypeptide sequence of SEQ ID NO:Y, a polypeptide encoded by SEQ ID NO:X, and/or a polypeptide encoded by a cDNA contained in ATCC deposit No.Z. Polynucleotides encoding a polypeptide comprising, or alternatively consisting of the polypeptide sequence of SEQ ID NO:Y, a polypeptide encoded by SEQ ID NO:X and/or a polypeptide encoded by the cDNA contained in ATCC Deposit No.Z, are also encompassed by the invention. The present invention further encompasses a polynucleotide comprising, or alternatively consisting of the complement of the nucleic acid sequence of SEQ ID NO:X, and/or the complement of the coding strand of the cDNA contained in ATCC Deposit No.Z.

Description of Table 1B (Comprised of Tables 1B.1 and 1B.2)

[0058] Table 1B.1 and Table 1B.2 summarize some of the polynucleotides encompassed by the invention (including cDNA clones related to the sequences (Clone ID:), contig sequences (contig identifier (Contig ID:) and contig nucleotide sequence identifiers (SEQ ID NO:X)) and further summarizes certain characteristics of these polynucleotides and the polypeptides encoded thereby. The first column of Tables 1B. 1 and 1B.2 provide the gene numbers in the application for each clone identifier. The second column of Tables 1B.1 and 1B.2 provide unique clone identifiers, “Clone ID:”, for cDNA clones related to each contig sequence disclosed in Table 1A and/or Table 1B. The third column of Tables 1B.1 and 1B.2 provide unique contig identifiers, “Contig ID:” for each of the contig sequences disclosed in these tables. The fourth column of Tables 1B.1 and 1B.2 provide the sequence identifiers, “SEQ ID NO:X”, for each of the contig sequences disclosed in Table 1A and/or 1B.

[0059] Table 1B.1

[0060] The fifth column of Table 1B.1, “ORP (From-To)”, provides the location (i.e., nucleotide position numbers) within the polynucleotide sequence of SEQ ID NO:X that delineates the preferred open reading frame (ORF) that encodes the amino acid sequence shown in the sequence listing and referenced in Table 1B.1 as SEQ ID NO:Y (column 6). Column 7 of Table 1B. 1 lists residues comprising predicted epitopes contained in the polypeptides encoded by each of the preferred ORFs (SEQ ID NO:Y). Identification of potential immunogenic regions was performed according to the method of Jameson and Wolf (CABIOS, 4; 181-186 (1988)); specifically, the Genetics Computer Group (GCG) implementation of this algorithm, embodied in the program PEPTIDESTRUCTTRE (Wisconsin Package v10.0Genetics Computer Group (GCG), Madison, Wis.). This method returns a measure of the probability that a given residue is found on the surface of the protein. Regions where the antigenic index score is greater than 0.9 over at least 6 amino acids are indicated in Table 1B.1 as “Predicted Epitopes”. In particular embodiments, polypeptides of the invention comprise, or alternatively consist of, one, two, three, four, five or more of the predicted epitopes described in Table 1B.1. It will be appreciated that depending on the analytical criteria used to predict antigenic determinants, the exact address of the determinant may vary slightly. Column 8 of Table 1B.1 (“Cytologic Band”) provides the chromosomal location of polynucleotides corresponding to SEQ ID NO:X. Chromosomal location was determined by finding exact matches to EST and cDNA sequences contained in the NCBI (National Center for Biotechnology Information) UniGene database. Given a presumptive chromosomal location, disease locus association was determined by comparison with the Morbid Map, derived from Online Mendelian Inheritance in Man (Online Mendelian Inheritance in Man, OMIM™. McKusick-Nathans Institute for Genetic Medicine, Johns Hopkins University (Baltimore, Md.) and National Center for Biotechnology Information, National Library of Medicine (Bethesda, Md.) 2000. World Wide Web URL: http://www.ncbi.nhnlnih.gov/omirn/). If the putative chromosomal location of the Query overlaps with the chromosomal location of a Morbid Map entry, an OMIM identification number is disclosed in Table 1B. 1, column 9 labeled “OMIM Disease Reference(s)”. A key to the OMIM reference identification numbers is provided in Table 5.

[0061] Table 1B.2

[0062] Column 5 of Table 1B.2, “Tissue Distribution” shows the expression profile of tissue, cells, and/or cell line libraries which express the polynucleotides of the invention. The first code number shown in Table 1B.2 column 5 (preceding the colon), represents the tissue/cell source identifier code corresponding to the key provided in Table 4. Expression of these polynucleotides was not observed in the other tissues and/or cell libraries tested. The second number in column 5 (following the colon), represents the number of times a sequence corresponding to the reference polynucleotide sequence (e.g., SEQ ID NO:X) was identified in the corresponding tissue/cell source. Those tissue/cell source identifier codes in which the first two letters are “AR” designate information generated using DNA array technology. Utilizing this technology, cDNAs were amplified by PCR and then transferred, in duplicate, onto the array. Gene expression was assayed through hybridization of first strand cDNA probes to the DNA array. cDNA probes were generated from total RNA extracted from a variety of different tissues and cell lines. Probe synthesis was performed in the presence of ³³ P dCTP, using oligo(dT) to prime reverse transcription. After hybridization, high stringency washing conditions were employed to remove non-specific hybrids from the array. The remaining signal, emanating from each gene target, was measured using a Phosphorimager. Gene expression was reported as Phosphor Stimulating Luminescence (PSL) which reflects the level of phosphor signal generated from the probe hybridized to each of the gene targets represented on the array. A local background signal subtraction was performed before the total signal generated from each array was used to normalize gene expression between the different hybridizations. The value presented after “[array code]:” represents the mean of the duplicate values, following background subtraction and probe normalization. One of skill in the art could routinely use this information to identify normal and/or diseased tissue(s) which show a predominant expression pattern of the corresponding polynucleotide of the invention or to identify polynucleotides which show predominant and/or specific tissue and/or cell expression.

[0063] Description of Table 1C

[0064] Table 1C summarizes additional polynucleotides encompassed by the invention (including cDNA clones related to the sequences (Clone ID:), contig sequences (contig identifier (Contig ID:) contig nucleotide sequence identifiers (SEQ ID NO:X)), and genomic sequences (SEQ ID NO:B). The first column provides a unique clone identifier, “Clone ID:” , for a cDNA clone related to each contig sequence. The second column provides the sequence identifier, “SEQ ID NO:X”, for each contig sequence. The third column provides a unique contig identifier, “Contig ID:” for each contig sequence. The fourth column, provides a BAC identifier “BAC ID NO:A” for the BAC clone referenced in the corresponding row of the table. The fifth column provides the nucleotide sequence identifier, “SEQ ID NO:B” for a fragment of the BAC clone identified in column four of the corresponding row of the table. The sixth column, “Exon From-To”, provides the location (i.e., nucleotide position numbers) within the polynucleotide sequence of SEQ ID NO:B which delineate certain polynucleotides of the invention that are also exemplary members of polynucleotide sequences that encode polypeptides of the invention (e.g., polypeptides containing amino acid sequences encoded by the polynucleotide sequences delineated in column six, and fragments and variants thereof).

[0065] Description of Table 1D

[0066] Table 1D: In preferred embodiments, the present invention encompasses a method of detecting, preventing, diagnosing, prognosticating, treating, and/or ameliorating gastrointestinal diseases or disorders; comprising administering to a patient in which such treatment, prevention, or amelioration is desired a protein, nucleic acid, or antibody of the invention (or fragment or variant thereof) represented by Table 1A, Table 1B, and Table 1C, in an amount effective to detect, prevent, diagnose, prognosticate, treat, and/or ameliorate the disease or disorder.

[0067] As indicated in Table 1D, the polynucleotides, polypeptides, agonists, or antagonists of the present invention (including antibodies) can be used in assays to test for one or more biological activities. If these polynucleotides and polypeptides do exhibit activity in a particular assay, it is likely that these molecules may be involved in the diseases associated with the biological activity. Thus, the polynucleotides or polypeptides, or agonists or antagonists thereof (including antibodies) could be used to treat the associated disease.

[0068] Table 1D provides information related to biological activities for polynucleotides and polypeptides of the invention (including antibodies, agonists, and/or antagonists thereof). Table 1D also provides information related to assays which may be used to test polynucleotides and polypeptides of the invention (including antibodies, agonists, and/or antagonists thereof) for the corresponding biological activities. The first column (“Gene No.”) provides the gene number in the application for each clone identifier. The second column (“cDNA Clone ID:”) provides the unique clone identifier for each clone as previously described and indicated in Tables 1A, 1B, and 1C. The third column (“AA SEQ ID NO:Y”) indicates the Sequence Listing SEQ ID Number for polypeptide sequences encoded by the corresponding cDNA clones (also as indicated in Tables 1A, 1B, and 2). The fourth column (“Biological Activity”) indicates a biological activity corresponding to the indicated polypeptides (or polynucleotides encoding said polypeptides). The fifth column (“Exemplary Activity Assay”) further describes the corresponding biological activity and provides information pertaining to the various types of assays which may be performed to test, demonstrate, or quantify the corresponding biological activity. Table 1D describes the use of FMAT technology, inter alia, for testing or demonstrating various biological activities. Fluorometric microvolume assay technology (FMAT) is a fluorescence-based system which provides a means to perform nonradioactive cell- and bead-based assays to detect activation of cell signal transduction pathways. This technology was designed specifically for ligand binding and immunological assays. Using this technology, fluorescent cells or beads at the bottom of the well are detected as localized areas of concentrated fluorescence using a data processing system. Unbound flurophore comprising the background signal is ignored, allowing for a wide variety of homogeneous assays. FMAT technology may be used for peptide ligand binding assays, immunofluorescence, apoptosis, cytotoxicity, and bead-based immunocapture assays. See, Miraglia S et. al., “Homogeneous cell and bead based assays for highthroughput screening using flourometric microvolume assay technology,” Journal of Biomolecular Screening; 4:193-204 (1999). In particular, FMAT technology may be used to test, confirm, and/or identify the ability of polypeptides (including polypeptide fragments and variants) to activate signal transduction pathways. For example, FMAT technology may be used to test, confirm, and/or identify the ability of polypeptides to upregulate production of immunomodulatory proteins (such as, for example, interleukins, GM-CSF, Rantes, and Tumor Necrosis factors, as well as other cellular regulators (e.g. insulin)).

[0069] Table 1D also describes the use of kinase assays for testing, demonstrating, or quantifying biological activity. In this regard, the phosphorylation and de-phosphorylation of specific amino acid residues (e.g. Tyrosine, Serine, Threonine) on cell-signal transduction proteins provides a fast, reversible means for activation and de-activation of cellular signal transduction pathways. Moreover, cell signal transduction via phosphorylationlde-phosphorylation is crucial to the regulation of a wide variety of cellular processes (e.g. proliferation, differentiation, migration, apoptosis, etc.). Accordingly, kinase assays provide a powerful tool useful for testing, confirming, and/or identifying polypeptides (including polypeptide fragments and variants) that mediate cell signal transduction events via protein phosphorylation. See e.g., Forrer, P., Tamaskovic R., and Jaussi, R. “Enzyme-Linked Immunosorbent Assay for Measurement of JNK, ERK, and p38 Kinase Activities” Biol. Chem. 379(8-9): 1101-1110 (1998).

[0070] Description of Table 2

[0071] Table 2 summarizes homology and features of some of the polypeptides of the invention. The first column provides a unique clone identifier, “Clone ID:”, corresponding to a cDNA clone disclosed in Table 1A or Table 1B. The second column provides the unique contig identifier, “Contig ID:” corresponding to contigs in Table 1B and allowing for correlation with the information in Table 1B. The third column provides the sequence identifier, “SEQ ID NO:X”, for the contig polynucleotide sequence. The fourth column provides the analysis method by which the homology/identity disclosed in the Table was determined. Comparisons were made between polypeptides encoded by the polynucleotides of the invention and either a non-redundant protein database (herein referred to as “NR”), or a database of protein families (herein referred to as ”PFAM”) as further described below: The fifth column provides a description of the PFAMINR hit having a significant match to a polypeptide of the invention. Column six provides the accession number of the PFAMNR hit disclosed in the fifth column. Column seven, “Score/Percent Identity”, provides a quality score or the percent identity, of the hit disclosed in columns five and six. Columns 8 and 9, “NT From” and “NT To” respectively, delineate the polynucleotides in “SEQ ID NO:X” that encode a polypeptide having a significant match to the PFAM/NR database as disclosed in the fifth and sixth columns. In specific embodiments polypeptides of the invention comprise, or alternatively consist of, an amino acid sequence encoded by a polynucleotide in SEQ ID NO:X as delineated in columns 8 and 9, or fragments or variants thereof.

[0072] Description of Table 3

[0073] Table 3 provides polynucleotide sequences that may be disclaimed according to certain embodiments of the invention. The first column provides a unique clone identifier, “Clone ID”, for a cDNA clone related to contig sequences disclosed in Table 1B. The second column provides the sequence identifier, “SEQ ID NO:X”, for contig sequences disclosed in Table 1A and/or Table 1B. The third column provides the unique contig identifier, “Contig ID:”, for contigs disclosed in Table 1B. The fourth column provides a unique integer ‘a’ where ‘a’ is any integer between 1 and the final nucleotide minus 15 of SEQ ID NO:X, and the fifth column provides a unique integer ‘b’ where ‘b’ is any integer between 15 and the final nucleotide of SEQ ID NO:X, where both a and b correspond to the positions of nucleotide residues shown in SEQ ID NO:X, and where b is greater than or equal to a+14. For each of the polynucleotides shown as SEQ ID NO:X, the uniquely defmed integers can be substituted into the general formula of a−b, and used to describe polynucleotides which may be preferably excluded from the invention. In certain embodiments, preferably excluded from the invention are at least one, two, three, four, five, ten, or more of the polynucleotide sequence(s) having the accession number(s) disclosed in the sixth column of this Table (including for example, published sequence in connection with a particular BAC clone). In further embodiments, preferably excluded from the invention are the specific polynucleotide sequence(s) contained in the clones corresponding to at least one, two, three, four, five, ten, or more of the available material having the accession numbers identified in the sixth column of this Table (including for example, the actual sequence contained in an identified BAC clone).

[0074] Description of Table 4

[0075] Table 4 provides a key to the tissue/cell source identifier code disclosed. in Table 1B.2, column 5. Column 1 of Table 4 provides the tissue/cell source identifier code disclosed in Table 1B.2, Column 5. Columns 2-5 provide a description of the tissue or cell source. Note that “Description” and “Tissue” sources (i.e. columns 2 and 3) having the prefix “a_” indicates organs, tissues, or cells derived from “adult” sources. Codes corresponding to diseased tissues are indicated in column 6 with the word “disease.” The use of the word “disease” in column 6 is non-limiting. The tissue or cell source may be specific (e.g. a neoplasm), or may be disease-associated (e.g., a tissue sample from a normal portion of a diseased organ). Furthermore, tissues and/or cells lacking the “disease” designation may still be derived from sources directly or indirectly involved in a disease state or disorder, and therefore may have a further utility in that disease state or disorder. In numerous cases where the tissue/cell source is a library, column 7 identifies the vector used to generate the library.

[0076] Description of Table 5

[0077] Table 5 provides a key to the OMIM reference identification numbers disclosed in Table 1B.1, column 9. OMIM reference identification numbers (Column 1) were derived from Online Mendelian Inheritance in Man (Online Mendelian Inheritance in Man, OSM. McKusick-Nathans Institute for Genetic Medicine, Johns Hopkins University (Baltimore, Md.) and National Center for Biotechnology Information, National Library of Medicine, (Bethesda, Md.) 2000. World Wide Web URL: http:flwww.ncbi.nlm.nih.gov/omim/). Column 2 provides diseases associated with the cytologic band disclosed in Table 1B. 1, column 8, as determined using the Morbid Map database.

[0078] Description of Table 6

[0079] Table 6 summarizes some of the ATCC Deposits, Deposit dates, and ATCC designation numbers of deposits made with the ATCC in connection with the present application. These deposits were made in addition to those described in the Table 1A.

[0080] Description of Table 7

[0081] Table 7 shows the cDNA libraries sequenced, and ATCC designation numbers and vector information relating to these cDNA libraries.

[0082] The first column shows the first four letters indicating the Library from which each library clone was derived. The second column indicates the catalogued tissue description for the corresponding libraries. The third column indicates the vector containing the corresponding clones. The fourth column shows the ATCC deposit designation for each libray clone as indicated by the deposit information in Table 6.

[0083] Definitions

[0084] The following definitions are provided to facilitate understanding of certain terms used throughout this specification.

[0085] In the present invention, “isolated” refers to material removed from its original environment (e.g., the natural environment if it is naturally occurring), and thus is altered “by the hand of man” from its natural state. For example, an isolated polynucleotide could be part of a vector or a composition of matter, or could be contained within a cell, and still be “isolated” because that vector, composition of matter, or particular cell is not the original environment of the polynucleotide. The term “isolated” does not refer to genomic or cDNA libraries, whole cell total or mRNA preparations, genomic DNA preparations (including those separated by electrophoresis and transferred onto blots), sheared whole cell genomic DNA preparations or other compositions where the art demonstrates no distinguishing features of the polynucleotide/sequences of the present invention.

[0086] In the present invention, a “secreted” protein refers to those proteins capable of being directed to the ER, secretory vesicles, or the extracellular space as a result of a signal sequence, as well as those proteins released into the extracellular space without necessarily containing a signal sequence. If the secreted protein is released into the extracellular space, the secreted protein can undergo extracellular processing to produce a “mature” protein. Release into the extracellular space can occur by many mechanisms, including exocytosis and proteolytic cleavage.

[0087] As used herein, a “polynucleotide” refers to a molecule having a nucleic acid sequence encoding SEQ ID NO:Y or a fragment or variant thereof (e.g., the polypeptide delinated in columns fourteen and fifteen of Table 1A); a nucleic acid sequence contained in SEQ ID NO:X (as described in column 5 of Table 1A and/or column 3 of Table 1B) or the complement thereof; a cDNA sequence contained in Clone ID: (as described in column 2 of Table 1A and/or Table 1B and contained within a library deposited with the ATCC); a nucleotide sequence encoding the polypeptide encoded by a nucleotide, sequence in SEQ ID NO:B as defined in column 6 (EXON From-To) of Table 1C or a fragment or variant thereof; or a nucleotide coding sequence in SEQ ID NO:B as defined in column 6 of Table 1C or the complement thereof. For example, the polynucleotide can contain the nucleotide sequence of the full length cDNA sequence, including the 5′ and 3′ untranslated sequences, the coding region, as well as fragments, epitopes, domains, and variants of the nucleic acid sequence. Moreover, as used herein, a “polypeptide” refers to a molecule having an amino acid sequence encoded by a polynucleotide of the invention as broadly defined (obviously excluding poly-Phenylalanine or poly-Lysine peptide sequences which result from translation of a polyA tail of a sequence corresponding to a cDNA).

[0088] In the present invention, “SEQ ID NO:X” was often generated by overlapping sequences contained in multiple clones (contig analysis). A representative clone containing all or most of the sequence for SEQ ID NO:X is deposited at Human Genome Sciences, Inc. (HGS) in a catalogued and archived library. As shown, for example, in column 2 of Table 1B, each clone is identified by a cDNA Clone ID (identifier generally referred to herein as Clone ID:). Each Clone ID is unique to an individual clone and the Clone ID is all the information needed to retrieve a given clone from the HGS library. Table 7 provides a list of the deposited cDNA libraries. One can use the Clone ID: to determine the library source by reference to Tables 6 and 7. Table 7 lists the deposited cDNA libraries by name and links each library to an ATCC Deposit. Library names contain four characters, for example, “HTWE.” The name of a cDNA clone (Clone ID) isolated from that library begins with the same four characters, for example “HTWEP07”. As mentioned below, Table 1A and/or Table 1B correlates the Clone ID names with SEQ ID NO:X. Thus, starting with an SEQ ID NO:X, one can use Tables 1A, 1B, 6, 7, and 9 to determine the corresponding Clone ID, which library it came from and which ATCC deposit the library is contained in. Furthermore, it is possible to retrieve a given cDNA clone from the source library by techniques known in the art and described elsewhere herein. The ATCC is located at 10801 University Boulevard, Manassas, Va. 20110-2209, USA. The ATCC deposits were made pursuant to the terms of the Budapest Treaty on the international recognition of the deposit of microorganisms for the purposes of patent procedure.

[0089] In specific embodiments, the polynucleotides of the invention are at least 15, at least 30, at least 50, at least 100, at least 125, at least 500, or at least 1000 continuous nucleotides but are less than or equal to 300 kb, 200 kb, 100 kb, 50 kb, 15 kb, 10 kb, 7.5 kb, 5 kb, 2.5 kb, 2.0, or 1 kb, in length. In a further embodiment, polynucleotides of the invention comprise a portion of the coding sequences, as disclosed herein, but do not comprise all or a portion of any intron. In another embodiment, the polynucleotides comprising coding sequences do not contain coding sequences of a genomic flanking gene (i.e., 5′ or 3′ to the gene of interest in the genome). In other embodiments, the polynucleotides of the invention do not contain the coding sequence of more than 1000, 500, 250, 100, 50, 25, 20, 15, 10, 5, 4, 3, 2, or 1 genomic flanking gene(s).

[0090] A “polynucleotide” of the present invention also includes those polynucleotides capable of hybridizing, under stringent hybridization conditions, to sequences contained in SEQ ID NO:X, or the complement thereof (e.g., the complement of any one, two, three, four, or more of the polynucleotide fragments described herein), the polynucleotide sequence delineated in columns 7 and 8 of Table 1A or the complement thereof, the polynucleotide sequence delineated in columns 8 and 9 of Table 2 or the complement thereof, and/or cDNA sequences contained in Clone ID: (e.g., the complement of any one, two, three, four, or more of the polynucleotide fragments, or the cDNA clone within the pool of cDNA clones deposited with the ATCC, described herein), and/or the polynucleotide sequence delineated in column 6 of Table 1C or the complement thereof. “Stringent hybridization conditions” refers to an overnight incubation at 42 degree C. in a solution comprising 50% formamide, 5×SSC (750 mM NaCl, 75 mM trisodium citrate), 50 mM sodium phosphate (pH 7.6), 5× Denhardt's solution, 10% dextran sulfate, and 20 μ/ml Aglml denatured, sheared salmon sperm DNA, followed by washing the filters in 0.1×SSC at about 65 degree C.

[0091] Also contemplated are nucleic acid molecules that hybridize to the polynucleotides of the present invention at lower stringency hybridization conditions. Changes in the stringency of hybridization and signal detection are primarily accomplished through the manipulation of formamide concentration (lower percentages of formamide result in lowered stringency); salt conditions, or temperature. For example, lower stringency conditions include an overnight incubation at 37 degree C. in a solution comprising 6×SSPE (20×SSPE=3M NaCl; 0.2M NaH₂PO₄; 0.02M EDTA, pH 7.4), 0.5% SDS, 30% formamide, 100 μ/ml salnon sperm blocking DNA; followed by washes at 50 degree C. with 1×SSPE, 0.1% SDS. In addition, to achieve even lower stringency, washes performed following stringent hybridization can be done at higher salt concentrations (e.g. 5×SSC).

[0092] Note that variations in the above conditions may be accomplished through the inclusion and/or substitution of alternate blocking reagents used to suppress background in hybridization experiments. Typical blocking reagents include Denhardt's reagent, BLOTIO, heparin, denatured salmon sperm DNA, and commercially available proprietary formulations. The inclusion of specific blocking reagents may require modification of the hybridization conditions described above, due to problerns with compatibility.

[0093] Of course, a polynucleotide which hybridizes only to polyA+ sequences (such as any 3′ terminal polyA+ tract of a cDNA shown in the sequence listing), or to a complementary stretch of T (or U) residues, would not be included in the definition of “polynucleotide,” since such a polynucleotide would hybridize to any nucleic acid molecule containing a poly (A) stretch or the complement thereof (e.g., practically any double-stranded cDNA clone generated using oligo dT as a primer).

[0094] The polynucleotide of the present invention can be composed of any polyribonucleotide or polydeoxribonucleotide, which may be unmodified RNA or DNA or modified RNA or DNA. For example, polynucleotides can be composed of single- and double-stranded DNA, DNA that is a mixture of single- and double-stranded regions, single- and double-stranded RNA, and RNA that is mixture of single- and double-stranded regions, hybrid molecules comprising DNA and RNA that may be single-stranded or, more typically, double-stranded or a mixture of single- and double-stranded regions. In addition, the polynucleotide can be composed of triple-stranded regions comprising RNA or DNA or both RNA and DNA. A polynucleotide may also contain one or more modified bases or DNA or RNA backbones modified for stability or for other reasons. “Modified” bases include, for example, tritylated bases and unusual bases such as inosine. A variety of modifications can be made to DNA and RNA; thus, “polynucleotide” embraces chemically, enzyrnatically, or metabolically modified forms.

[0095] In specific embodiments, the polynucleotides of the invention are at least 15, at least 30, at least 50, at least 100, at least 125, at least 500, or at least 1000 continuous nucleotides but are less than or equal to 300 kb, 200 kb, 100 kb, 50 kb, 15 kb, 10 kb, 7.5 kb, 5 kb, 2.5 kb, 2.0 kb, or 1 kb, in coding sequences, as disclosed herein, but do not comprise all or a portion of any intron. In another embodiment, the polynucleotides comprising coding sequences do not contain coding sequences of a genomic flanking gene (i.e., 5′ or 3′ to the gene of interest in the genome). In other embodiments, the polynucleotides of the invention do not contain the coding sequence of more than 1000, 500, 250, 100, 50, 25, 20, 15, 10, 5, 4, 3, 2, or 1 genomic flanking gene(s).

[0096] “SEQ ID NO:X” refers to a polynucleotide sequence described in column 5 of Table 1A, while “SEQ ID NO:Y” refers to a polypeptide sequence described in column 10 of Table 1A. SEQ ID NO:X is identified by an integer specified in column 6 of Table 1A. The polypeptide sequence SEQ ID NO:Y is a translated open reading frame (ORF) encoded by polynucleotide SEQ ID NO:X. The polynucleotide sequences are shown in the sequence listing immediately followed by all of the polypeptide sequences. Thus, a polypeptide sequence corresponding to polynucleotide sequence SEQ ID NO:2 is the first polypeptide sequence shown in the sequence listing. The second polypeptide sequence corresponds to the polynucleotide sequence shown as SEQ ID NO:3, and so on.

[0097] The polypeptide of the present invention can be composed of amino acids joined to each other by peptide bonds or modified peptide bonds, i.e., peptide isosteres, and may contain amino acids other than the 20 gene-encoded amino acids. The polypeptides may be modified by either natural processes, such as posttranslational processing, or by chemical modification techniques which are well known in the art. Such modifications are well described in basic texts and in more detailed monographs, as well as in a voluminous research literature. Modifications can occur anywhere in a polypeptide, including the peptide backbone, the amino acid side-chains and the amino or carboxyl termini. It will be appreciated that the same type of modification may be present in the same or varying degrees at several sites in a given polypeptide. Also, a given polypeptide may contain many types of modifications. Polypeptides may be branched, for example, as a result of ubiquitination, and they may be cyclic, with or without branching. Cyclic, branched, and branched cyclic polypeptides may result from posttranslation natural processes or may be made by synthetic methods. Modifications include acetylation, acylation, ADP-ribosylation, amidation, covalent attachment of fiavin, covalent attachment of a heme moiety, covalent attachment of a nucleotide or nucleotide derivative, covalent attachment of a lipid or lipid derivative, covalent attachment of phosphotidylinositol, cross-linking, cyclization, disulfide bond formation, demethylation, formation of covalent cross-links, formation of cysteine, formation of pyroglutamate, formylation, gamma-carboxylation, glycosylation, GPI anchor formation, hydroxylation, iodination, methylation, myristoylation, oxidation, pegylation, proteolytic processing, phosphorylation, prenylation, racemization, selenoylation, sulfation, transfer-RNA mediated addition of amino acids to proteins such as arginylation, and ubiquitination. (See, for instance, PROTEINS—STRUCTURE AND MOLECULAR PROPERTIES, 2nd Ed., T. E. Creighton, W. H. Freeman and Company, New York (1993); POSTTRANSLATIONAL COVALENT MODIFICATION OF PROTEINS, B. C. Johnson, Ed., Academic Press, New York, pgs. 1-12 (1983); Seifter et al:, Meth. Enzymol. 182:626-646 (1990); Rattan et al., Ann. N.Y. Acad. Sci. 663:48-62 (1992)).

[0098] “SEQ ID NO:X” refers to a polynucleotide sequence described, for example, in Tables 1A, Table 1B, or Table 2, while “SEQ ID NO:Y” refers to a polypeptide sequence described in column 11 of Table 1A and or column 6 of Table 1B.1. SEQ ID NO:X is identified by an integer specified in column 4 of Table 1B. The polypeptide sequence SEQ ID NO:Y is a translated open reading frame (ORF) encoded by polynucleotide SEQ ID NO:X. “Clone ID:” refers to a cDNA clone described in column 2 of Table 1A and/or 1B.

[0099] “A polypeptide having functional activity” refers to a polypeptide capable of displaying one or more known functional activities associated with a full-length (complete) protein. Such functional activities include, but are not limited to, biological activity (e.g. activity useful in treating, preventing and/or ameliorating gastrointestinal diseases and disorders), antigenicity (ability to bind [or compete with a polypeptide for binding] to an anti-polypeptide antibody), immunogenicity (ability to generate antibody which binds to a specific polypeptide of the invention), ability to form multimers with polypeptides of the invention, and ability to bind to a receptor or ligand for a polypeptide.

[0100] The polypeptides of the invention can be assayed for functional activity (e.g. biological activity) using or routinely modifying assays known in the art, as well as assays described herein. Specifically, one of skill in the art may routinely assay secreted polypeptides (including fragments and variants) of the invention for activity using assays as described in the examples section below.

[0101] “A polypeptide having biological activity” refers to a polypeptide exhibiting activity similar to, but not necessarily identical to, an activity of a polypeptide of the present invention, including mature forms, as measured in a particular biological assay, with or without dose dependency. In the case where dose dependency does exist, it need not be identical to that of the polypeptide, but rather substantially similar to the dose-dependence in a given activity as compared to the polypeptide of the present invention (i.e., the candidate polypeptide will exhibit greater activity or not more than about 25-fold less and, preferably, not more than about tenfold less activity, and most preferably, not more than about three-fold less activity relative to the polypeptide of the present invention).

Tables:

[0102] Table 1A

[0103] Table 1A summarizes information concerning certain polypnucleotides and polypeptides of the invention. The first column provides the gene number in the application for each clone identifier. The second column provides a unique clone identifier, “Clone ID:”, for a cDNA clone related to each contig sequence disclosed in Table 1A. Third column, the cDNA Clones identified in the second column were deposited as indicated in the third column (i.e. by ATCC Deposit No:Z and deposit date). Some of the deposits contain multiple different clones corresponding to the same gene. In the fourth column, “Vector” refers to the type of vector contained in the corresponding cDNA Clone identified in the second column. In the fifth column, the nucleotide sequence identified as “NT SEQ ID NO:X” was assembled from partially homologous (“overlapping”) sequences obtained from the corresponding cDNA clone identified in the second column and, in some cases, from additional related cDNA clones. The overlapping sequences were assembled into a single contiguous sequence of high redundancy (usually three to five overlapping sequences at each nucleotide position), resulting in a final sequence identified as SEQ ID NO:X. In the sixth column, “Total NT Seq.”refers to the total number of nucleotides in the contig sequence identified as SEQ ID NO:X.”The deposited clone may contain all or most of these sequences, reflected by the nucleotide position indicated as “5′ NT of Clone Seq.” (seventh column) and the “3′ NT of Clone Seq.” (eighth column) of SEQ ID NO:X. In the ninth column, the nucleotide position of SEQ ID NO:X of the putative start codon (methionine) is identified as “5′ NT of Start Codon.”Similarly , in column ten, the nucleotide position of SEQ ID NO:X of the predicted signal sequence is identified as “5′ NT of First AA of Signal Pep.”In the eleventh column, the translated amino acid sequence, beginning with the methionine, is identified as “AA SEQ ID NO:Y,” although other reading frames can also be routinely translated using known molecular biology techniques. The polypeptides produced by these alternative open reading frames are specifically contemplated by the present invention.

[0104] In the twelfth and thirteenth columns of Table 1A, the first and last amino acid position of SEQ ID NO:Y of the predicted signal peptide is identified as “First AA of Sig Pep” and “Last AA of Sig Pep.” In the fourteenth column, the predicted first amino acid position of SEQ ID NO:Y of the secreted portion is identified as “Predicted First AA of Secreted Portion”. The amino acid position of SEQ ID NO:Y of the last amino acid encoded by the open reading frame is identified in the fifteenth column as “Last AA of ORF”.

[0105] SEQ ID NO:X (where X may be any of the polynucleotide sequences disclosed in the sequence listing) and the translated SEQ ID NO:Y (where Y may be any of the polypeptide sequences disclosed in the sequence listing) are sufficiently accurate and otherwise suitable for a variety of uses well known in the art and described further below. For instance, SEQ ID NO:X is useful for designing nucleic acid hybridization probes that will detect nucleic acid sequences contained in SEQ ID NO:X or the cDNA contained in the deposited clone. These probes will also hybridize to nucleic acid molecules in biological samples, thereby enabling a variety of forensic and diagnostic methods of the invention. Similarly, polypeptides identified from SEQ ID NO:Y may be used, for example, to generate antibodies which bind specifically to proteins containing the polypeptides and the secreted proteins encoded by the cDNA clones identified in Table 1A and/or elsewhere herein

[0106] Nevertheless, DNA sequences generated by sequencing reactions can contain sequencing errors. The errors exist as misidentified nucleotides, or as insertions or deletions of nucleotides in the generated DNA sequence. The erroneously inserted or deleted nucleotides cause frame shifts in the reading frames of the predicted amino acid sequence. In these cases, the predicted amino acid sequence diverges from the actual amino acid sequence, even though the generated DNA sequence may be greater than 99.9% identical to the actual DNA sequence (for example, one base insertion or deletion in an open reading frame of over 1000 bases).

[0107] Accordingly, for those applications requiring precision in the nucleotide sequence or the amino acid sequence, the present invention provides not only the generated nucleotide sequence identified as SEQ ID NO:X, and the predicted translated amino acid sequence identified as SEQ ID NO:Y, but also a sample of plasmid DNA containing a human cDNA of the invention deposited with the ATCC, as set forth in Table 1A. The nucleotide sequence of each deposited plasmid can readily be determined by sequencing the deposited plasmid in accordance with known methods

[0108] The predicted amino acid sequence can then be verified from such deposits. Moreover, the amino acid sequence of the protein encoded by a particular plasmid can also be directly determined by peptide sequencing or by expressing the protein in a suitable host cell containing the deposited human cDNA, collecting the protein, and determining its sequence.

[0109] Also provided in Table 1A is the name of the vector which contains the cDNA plasmid. Each vector is routinely used in the art. The following additional information is provided for convenience.

[0110] Vectors Lambda Zap (U.S. Pat. Nos. 5,128,256 and 5,286,636), Uni-Zap XR (U.S. Pat. Nos. 5,128, 256 and 5,286,636), Zap Express (U.S. Pat. Nos. 5,128,256 and 5,286,636), pBluescript (pBS) (Short, J. M. et al., Nucleic Acids Res. 16:7583-7600 (1988); Alting-Mees, M. A. and Short, J. M., Nucleic Acids Res. 17:9494 (1989)) and pBK (Alting-Mees, M. A. et al., Strategies 5:58-61 (1992)) are commercially available from Stratagene Cloning Systems, Inc., 11011 N. Torrey Pines Road, La Jolla, Calif. 92037. pBS contains an ampicillin resistance gene and pBK contains a neomycin resistance gene. Phagemid pBS may be excised from the Lambda Zap and Uni-Zap XR vectors, and phagemid pBK may be excised from the Zap Express vector. Both phagemids may be transformed into E. coli strain XL-1 Blue, also available from Stratagene

[0111] Vectors pSport1, pCMVSport 1.0, pCMVSport 2.0 and pCMVSport 3.0, were obtained from Life Technologies, Inc., P. O. Box 6009, Gaithersburg, Md. 20897. All Sport vectors contain an ampicillin resistance gene and may be transformed into E. coli strain DH10B, also available from Life Technologies. See, for instance, Gruber, C. E., et al., Focus 15:59 (1993). Vector lafmid BA (Bento Soares, Columbia University, New York, N.Y.) contains an ampicillin resistance gene and can be transformed into E. coli strain XL-1 Blue. Vector pCRO®2.1, which is available from Invitrogen, 1600 Faraday Avenue, Carlsbad, Calif. 92008, contains an ampicillin resistance gene and may be transformed into E. coli strain DH10B, available from Life Technologies. See, for instance, Clark, J. M., Nuc. Acids Res. 16:9677-9686 (1988) and Mead, D. et al., Bio/Technology 9: (1991).

[0112] The present invention also relates to the genes corresponding to SEQ ID NO:X, SEQ ID NO:Y, and/or a deposited cDNA (cDNA Clone ID). The corresponding gene can be isolated in accordance with known methods using the sequence information disclosed herein. Such methods include, but are not limited to, preparing probes or primers from the disclosed sequence and identifying or amplifying the corresponding gene from appropriate sources of genomic material.

[0113] Also provided in the present invention are allelic variants, orthologs, and/or species homologs. Procedures known in the art can be used to obtain full-length genes, allelic variants, splice variants, full-length coding portions, orthologs, and/or species homologs of genes corresponding to SEQ ID NO:X and SEQ ID NO:Y using information from the sequences disclosed herein or the clones deposited with the ATCC. For example, allelic variants and/or species homologs may be isolated and identified by making suitable probes or primers from the sequences provided herein and screening a suitable nucleic acid source for allelic variants and/or the desired homologue.

[0114] The present invention provides a polynucleotide comprising, or alternatively consisting of, the nucleic acid sequence of SEQ ID NO:X and/or a cDNA contained in ATCC Deposit No.Z. The present invention also provides a polypeptide comprising, or alternatively, consisting of, the polypeptide sequence of SEQ ID NO:Y, a polypeptide encoded by SEQ ID NO:X, and/or a polypeptide encoded by a cDNA contained in ATCC deposit No.Z. Polynucleotides encoding a polypeptide comprising, or alternatively consisting of the polypeptide sequence of SEQ ID NO:Y, a polypeptide encoded by SEQ D NO:X and/or a polypeptide encoded by the cDNA contained in ATCC Deposit No.Z, are also encompassed by the invention. The present invention further encompasses a polynucleotide comprising, or alternatively consisting of the complement of the nucleic acid sequence of SEQ ID NO:X, and/or the complement of the coding strand of the cDNA contained in ATCC Deposit No.Z.

TABLE 1A

| | | | | | | | | | 5′ NT | | | | | |
|---|---|---|---|---|---|---|---|---|---|---|---|---|---|---|
| | | | | | | | | | of | AA | First | | | |
| | | ATCC | | NT | | 5′ NT | 3′ NT | 5′ NT | First | SEQ | AA | Last | First | Last |
| | | Deposit | | SEQ | Total | of | of | of | AA of | ID | of | AA of | AA of | AA |
| Gene | cDNA | No: Z and | | ID | NT | Clone | Clone | Start | Signal | NO: | Sig | Sig | Secreted | of |
| No. | Clone ID | Date | Vector | NO: X | Seq. | Seq. | Seq. | Codon | Pep | Y | Pep | Pep | Portion | ORF |
| 1 | H2CBU83 | 209889 | pBluescript SK- | 11 | 2703 | 1 | 2703 | 157 | 157 | 300 | 1 | 30 | 31 | 207 |
| | | May 22, 1998 | | | | | | | | | | | | |
| 1 | H2CBU83 | 209889 | pBluescript SK- | 189 | 2709 | 1 | 2709 | 157 | 157 | 478 | 1 | 30 | 31 | 51 |
| | | May 22, 1998 | | | | | | | | | | | | |
| 2 | H6EDC19 | 209324 | Uni-ZAP XR | 12 | 760 | 324 | 760 | 389 | 389 | 301 | 1 | 25 | 26 | 114 |
| | | Oct. 02, 1997 | | | | | | | | | | | | |
| 3 | HACBD91 | 209626 | Uni-ZAP XR | 13 | 1445 | 1 | 1445 | 117 | 117 | 302 | 1 | 42 | 43 | 49 |
| | | Feb. 12, 1998 | | | | | | | | | | | | |
| 4 | HAGAQ26 | 209368 | Uni-ZAP XR | 14 | 1333 | 157 | 1333 | 251 | 251 | 303 | 1 | 20 | 21 | 62 |
| | | Oct. 16, 1997 | | | | | | | | | | | | |
| 5 | HAGDS35 | 209299 | Uni-ZAP XR | 15 | 751 | 1 | 751 | 45 | 45 | 304 | 1 | 23 | 24 | 122 |
| | | Sep. 25, 1997 | | | | | | | | | | | | |
| 5 | HAGDS35 | 209299 | Uni-ZAP XR | 190 | 813 | 1 | 813 | 52 | 52 | 479 | 1 | 23 | 24 | 118 |
| | | Sep. 25, 1997 | | | | | | | | | | | | |
| 6 | HAJAN23 | PTA-322 | pCMVSport 3.0 | 16 | 2849 | 1 | 2849 | 109 | 109 | 305 | 1 | 15 | 16 | 563 |
| | | Jul. 09, 1999 | | | | | | | | | | | | |
| 6 | HAJAN23 | PTA-322 | pCMVSport 3.0 | 191 | 2288 | 1 | 2288 | 120 | 120 | 480 | 1 | 15 | 16 | 169 |
| | | Jul. 09, 1999 | | | | | | | | | | | | |
| 7 | HAJBR69 | 209626 | pCMVSport 3.0 | 17 | 755 | 1 | 755 | 262 | 262 | 306 | 1 | 19 | 20 | 53 |
| | | Feb. 12, 1998 | | | | | | | | | | | | |
| 8 | HAMFE15 | 203364 | pCMVSport 3.0 | 18 | 4129 | 1 | 4129 | 1495 | 1495 | 307 | 1 | 34 | 35 | 421 |
| | | Oct. 19, 1998 | | | | | | | | | | | | |
| 8 | HAMFE15 | 203364 | pCMVSport 3.0 | 192 | 3758 | 1 | 3758 | 226 | 226 | 481 | 1 | 23 | 24 | 47 |
| | | Oct. 19, 1998 | | | | | | | | | | | | |
| 9 | HAMGR28 | 209965 | pCMVSport 3.0 | 19 | 1674 | 47 | 1674 | 98 | 98 | 308 | 1 | 18 | 19 | 242 |
| | | Jun. 11, 1998 | | | | | | | | | | | | |
| 9 | HAMGR28 | 209965 | pCMVSport 3.0 | 193 | 1534 | 1 | 1534 | 40 | 40 | 482 | 1 | 18 | 19 | 203 |
| | | Jun. 11, 1998 | | | | | | | | | | | | |
| 10 | HAPOM49 | 209878 | Uni-ZAP XR | 20 | 2005 | 1 | 2005 | 251 | 251 | 309 | 1 | 22 | 23 | 189 |
| | | May 18, 1998 | | | | | | | | | | | | |
| 10 | HAPOM49 | 209878 | Uni-ZAP XR | 194 | 2664 | 1 | 2664 | 448 | 448 | 483 | 1 | 1 | 2 | 123 |
| | | May 18, 1998 | | | | | | | | | | | | |
| 11 | HATBR65 | 209626 | Uni-ZAP XR | 21 | 812 | 1 | 812 | 252 | 252 | 310 | 1 | 16 | 17 | 64 |
| | | Feb. 12, 1998 | | | | | | | | | | | | |
| 12 | HAUAI83 | 209626 | Uni-ZAP XR | 22 | 910 | 1 | 886 | 253 | 253 | 311 | 1 | 18 | 19 | 49 |
| | | Feb. 12, 1998 | | | | | | | | | | | | |
| 12 | HAUAI83 | 209626 | Uni-ZAP XR | 195 | 1076 | 1 | 1076 | | 575 | 484 | 1 | 10 | 11 | 23 |
| | | Feb. 12, 1998 | | | | | | | | | | | | |
| 13 | HBAMB15 | 209683 | pSport1 | 23 | 821 | 330 | 821 | 390 | 390 | 312 | 1 | 19 | 20 | 59 |
| | | Mar. 20, 1998 | | | | | | | | | | | | |
| 14 | HBGBA69 | 209878 | Uni-ZAP XR | 24 | 981 | 1 | 981 | 124 | 124 | 313 | 1 | 38 | 39 | 240 |
| | | May 18, 1998 | | | | | | | | | | | | |
| 14 | HBGBA69 | 209878 | Uni-ZAP XR | 196 | 943 | 1 | 933 | 62 | 62 | 485 | 1 | 38 | 39 | 60 |
| | | May 18, 1998 | | | | | | | | | | | | |
| 15 | HBIAE26 | 209224 | Uni-ZAP XR | 25 | 1038 | 1 | 1038 | 75 | 75 | 314 | 1 | 18 | 19 | 39 |
| | | Aug. 28, 1997 | | | | | | | | | | | | |
| 16 | HBINS58 | PTA-885 | pCMVSport 3.0 | 26 | 843 | 1 | 843 | 57 | 57 | 315 | 1 | 30 | 31 | 174 |
| | | Oct. 28, 1999 | | | | | | | | | | | | |
| 16 | HBINS58 | PTA-885 | pCMVSport 3.0 | 197 | 1566 | 1 | 1566 | 71 | 71 | 486 | 1 | 29 | 30 | 173 |
| | | Oct. 28, 1999 | | | | | | | | | | | | |
| 16 | HBINS58 | PTA-885 | pCMVSport 3.0 | 198 | 1067 | 1 | 1067 | 100 | 100 | 487 | 1 | 29 | 30 | 210 |
| | | Oct. 28, 1999 | | | | | | | | | | | | |
| 17 | HBNAW17 | 209242 | Uni-ZAP XR | 27 | 601 | 1 | 601 | 77 | 77 | 316 | 1 | 37 | 38 | 61 |
| | | Sep. 12, 1997 | | | | | | | | | | | | |
| 18 | HCE2F54 | 209626 | Uni-ZAP XR | 28 | 1276 | 19 | 1256 | 166 | 166 | 317 | 1 | 19 | 20 | 319 |
| | | Feb. 12, 1998 | | | | | | | | | | | | |
| 19 | HCE3G69 | 209878 | Uni-ZAP XR | 29 | 2084 | 1 | 2084 | 165 | 165 | 318 | 1 | 19 | 20 | 336 |
| | | May 18, 1998 | | | | | | | | | | | | |
| 19 | HCE3G69 | 209878 | Uni-ZAP XR | 199 | 2078 | 1 | 2078 | 165 | 165 | 488 | 1 | 19 | 20 | 105 |
| | | May 18, 1998 | | | | | | | | | | | | |
| 20 | HCE5F43 | 209580 | Uni-ZAP XR | 30 | 1765 | 1 | 1765 | 113 | 113 | 319 | 1 | 20 | 21 | 272 |
| | | Jan. 14, 1998 | | | | | | | | | | | | |
| 21 | HCEFB80 | PTA-2069 | Uni-ZAP XR | 31 | 2494 | 1 | 2494 | 12 | 12 | 320 | 1 | 35 | 36 | 89 |
| | | Jun. 09, 2000 | | | | | | | | | | | | |
| 21 | HCEFB80 | PTA-2069 | Uni-ZAP XR | 200 | 2494 | 1 | 2451 | 5 | 5 | 489 | 1 | 35 | 36 | 89 |
| | | Jun. 09, 2000 | | | | | | | | | | | | |
| 22 | HCEWE20 | 209300 | Uni-ZAP XR | 32 | 885 | 13 | 885 | 166 | 166 | 321 | 1 | 18 | 19 | 51 |
| | | Sep. 25, 1997 | | | | | | | | | | | | |
| 23 | HCGMD59 | 209627 | pCMVSport 2.0 | 33 | 790 | 1 | 780 | 438 | 438 | 322 | 1 | 30 | 31 | 74 |
| | | Feb. 12, 1998 | | | | | | | | | | | | |
| 24 | HCNDR47 | PTA-855 | Lambda ZAP II | 34 | 1343 | 1 | 1343 | 21 | 21 | 323 | 1 | 24 | 25 | 127 |
| | | Oct. 18, 1999 | | | | | | | | | | | | |
| 24 | HCNDR47 | PTA-855 | Lambda ZAP II | 201 | 845 | 1 | 845 | 124 | 124 | 490 | 1 | 47 | 48 | 127 |
| | | Oct. 18, 1999 | | | | | | | | | | | | |
| 24 | HCNDR47 | PTA-855 | Lambda ZAP II | 202 | 738 | 1 | 738 | | 603 | 491 | 1 | 8 | 9 | 9 |
| | | Oct. 18, 1999 | | | | | | | | | | | | |
| 25 | HCNSM70 | 209580 | pBluescript | 35 | 1089 | 1 | 1089 | 107 | 107 | 324 | 1 | 26 | 27 | 215 |
| | | Jan. 14, 1998 | | | | | | | | | | | | |
| 25 | HCNSM70 | 209580 | pBluescript | 203 | 1145 | 62 | 1145 | 161 | 161 | 492 | 1 | 26 | 27 | 91 |
| | | Jan. 14, 1998 | | | | | | | | | | | | |
| 26 | HCUIM65 | 209324 | ZAP Express | 36 | 875 | 331 | 736 | 557 | 557 | 325 | 1 | 27 | 28 | 47 |
| | | Oct. 02, 1997 | | | | | | | | | | | | |
| 27 | HCWDS72 | 209852 | ZAP Express | 37 | 320 | 1 | 320 | 19 | 19 | 326 | 1 | 17 | 18 | 100 |
| | | May 07, 1998 | | | | | | | | | | | | |
| 28 | HCWKC15 | 209324 | ZAP Express | 38 | 710 | 1 | 710 | 37 | 37 | 327 | 1 | 18 | 19 | 40 |
| | | Oct. 02, 1997 | | | | | | | | | | | | |
| 29 | HDHEB60 | 209215 | pCMVSport 2.0 | 39 | 1421 | 235 | 1421 | 568 | 568 | 328 | 1 | 24 | 25 | 108 |
| | | Aug. 21, 1997 | | | | | | | | | | | | |
| 30 | HDPBA28 | PTA-163 | pCMVSport 3.0 | 40 | 3447 | 197 | 3447 | 259 | 259 | 329 | 1 | 32 | 33 | 941 |
| | | Jun. 01, 1999 | | | | | | | | | | | | |
| 30 | HDPBA28 | PTA-163 | pCMVSport 3.0 | 204 | 4909 | 1 | 4909 | 69 | 69 | 493 | 1 | 32 | 33 | 941 |
| | | Jun. 01, 1999 | | | | | | | | | | | | |
| 31 | HDPCL63 | PTA-1544 | pCMVSport 3.0 | 41 | 3037 | 115 | 3037 | 35 | 35 | 330 | 1 | 58 | 59 | 267 |
| | | Mar. 21, 2000 | | | | | | | | | | | | |
| 31 | HDPCL63 | PTA-1544 | pCMVSport 3.0 | 205 | 2921 | 1 | 2921 | 260 | 260 | 494 | 1 | 17 | 18 | 157 |
| | | Mar. 21, 2000 | | | | | | | | | | | | |
| 31 | HDPCL63 | PTA-1544 | pCMVSport 3.0 | 206 | 1259 | 358 | 1259 | | 605 | 495 | 1 | 6 | 7 | 118 |
| | | Mar. 21, 2000 | | | | | | | | | | | | |
| 32 | HDPCO25 | 209125 | pCMVSport 3.0 | 42 | 767 | 76 | 767 | 182 | 182 | 331 | 1 | 20 | 21 | 53 |
| | | Jun. 19, 1997 | | | | | | | | | | | | |
| 33 | HDPFP29 | 209626 | pCMVSport 3.0 | 43 | 1057 | 1 | 1057 | 293 | 293 | 332 | 1 | 30 | 31 | 52 |
| | | Feb. 12, 1998 | | | | | | | | | | | | |
| 34 | HDPGT01 | 203027 | pCMVSport 3.0 | 44 | 2687 | 138 | 2687 | 8 | 8 | 333 | 1 | 28 | 29 | 87 |
| | | Jun. 26, 1998 | | | | | | | | | | | | |
| 35 | HDPHI51 | 209125 | pCMVSport 3.0 | 45 | 728 | 1 | 728 | 245 | 245 | 334 | 1 | 30 | 31 | 40 |
| | | Jun. 19, 1997 | | | | | | | | | | | | |
| 36 | HDPJM30 | 209563 | pCMVSport 3.0 | 46 | 1635 | 308 | 1633 | 59 | 59 | 335 | 1 | 59 | 60 | 525 |
| | | Dec. 18, 1997 | | | | | | | | | | | | |
| 36 | HDPJM30 | 209563 | pCMVSport 3.0 | 207 | 1314 | 1 | 1313 | 259 | 259 | 496 | 1 | 20 | 21 | 59 |
| | | Dec. 18, 1997 | | | | | | | | | | | | |
| 37 | HDPMM88 | PTA-848 | pCMVSport 3.0 | 47 | 4893 | 1 | 4893 | 100 | 100 | 336 | 1 | 37 | 38 | 937 |
| | | Oct. 13, 1999 | | | | | | | | | | | | |
| 37 | HDPMM88 | PTA-848 | pCMVSport 3.0 | 208 | 468 | 1 | 468 | 141 | 141 | 497 | 1 | 20 | 21 | 109 |
| | | Oct. 13, 1999 | | | | | | | | | | | | |
| 37 | HDPMM88 | PTA-848 | pCMVSport 3.0 | 209 | 181 | 1 | 181 | | 44 | 498 | 1 | 7 | 8 | 46 |
| | | Oct. 13, 1999 | | | | | | | | | | | | |
| 37 | HDPMM88 | PTA-848 | pCMVSport 3.0 | 210 | 612 | 1 | 612 | | 419 | 499 | 1 | | | 6 |
| | | Oct. 13, 1999 | | | | | | | | | | | | |
| 37 | HDPMM88 | PTA-848 | pCMVSport 3.0 | 211 | 1024 | 1 | 1024 | | 111 | 500 | 1 | 5 | 6 | 11 |
| | | Oct. 13, 1999 | | | | | | | | | | | | |
| 37 | HDPMM88 | PTA-848 | pCMVSport 3.0 | 212 | 366 | 18 | 321 | | 167 | 501 | 1 | 1 | 2 | 56 |
| | | Oct. 13, 1999 | | | | | | | | | | | | |
| 37 | HDPMM88 | PTA-848 | pCMVSport 3.0 | 213 | 519 | 1 | 519 | | 28 | 502 | 1 | 1 | 2 | 53 |
| | | Oct. 13, 1999 | | | | | | | | | | | | |
| 38 | HDPOJ08 | 209878 | pCMVSport 3.0 | 48 | 1655 | 1 | 1655 | 159 | 159 | 337 | 1 | 18 | 19 | 122 |
| | | May 18, 1998 | | | | | | | | | | | | |
| 39 | HDPPN86 | PTA-867 | pCMVSport 3.0 | 49 | 6297 | 1 | 6297 | 127 | 127 | 338 | 1 | 32 | 33 | 46 |
| | | Oct. 26, 1999 | | | | | | | | | | | | |
| 39 | HDPPN86 | PTA-867 | pCMVSport 3.0 | 214 | 2042 | 1 | 2042 | 117 | 117 | 503 | 1 | 26 | 27 | 46 |
| | | Oct. 26, 1999 | | | | | | | | | | | | |
| 40 | HDPSB18 | PTA-868 | pCMVSport 3.0 | 50 | 3408 | 1 | 3408 | 123 | 123 | 339 | 1 | 18 | 19 | 66 |
| | | Oct. 26, 1999 | | | | | | | | | | | | |
| 40 | HDPSB18 | PTA-868 | pCMVSport 3.0 | 215 | 308 | 1 | 308 | | 116 | 504 | 1 | 17 | 18 | 64 |
| | | Oct. 26, 1999 | | | | | | | | | | | | |
| 40 | HDPSB18 | PTA-868 | pCMVSport 3.0 | 216 | 1568 | 1 | 1568 | | 1525 | 505 | 1 | 7 | 8 | 14 |
| | | Oct. 26, 1999 | | | | | | | | | | | | |
| 40 | HDPSB18 | PTA-868 | pCMVSport 3.0 | 217 | 865 | 1 | 865 | | 345 | 506 | 1 | 1 | 2 | 107 |
| | | Oct. 26, 1999 | | | | | | | | | | | | |
| 41 | HDPSH53 | PTA-868 | pCMVSport 3.0 | 51 | 1663 | 1 | 1663 | 158 | 158 | 340 | 1 | 19 | 20 | 90 |
| | | Oct. 26, 1999 | | | | | | | | | | | | |
| 41 | HDPSH53 | PTA-868 | pCMVSport 3.0 | 218 | 1687 | 1 | 1687 | 153 | 153 | 507 | 1 | 19 | 20 | 127 |
| | | Oct. 26, 1999 | | | | | | | | | | | | |
| 41 | HDPSH53 | PTA-868 | pCMVSport 3.0 | 219 | 570 | 1 | 570 | 212 | 212 | 508 | 1 | 19 | 20 | 90 |
| | | Oct. 26, 1999 | | | | | | | | | | | | |
| 42 | HDPSP01 | 209745 | pCMVSport 3.0 | 52 | 2343 | 1 | 2343 | 184 | 184 | 341 | 1 | 20 | 21 | 710 |
| | | Apr. 07, 1998 | | | | | | | | | | | | |
| 42 | HDPSP01 | 209745 | pCMVSport 3.0 | 220 | 1752 | 1 | 1752 | 227 | 227 | 509 | 1 | 20 | 21 | 308 |
| | | Apr. 07, 1998 | | | | | | | | | | | | |
| 43 | HDPSP54 | 209782 | pCMVSport 3.0 | 53 | 3091 | 2304 | 3091 | 2356 | 2356 | 342 | 1 | 18 | 19 | 48 |
| | | Apr. 20, 1998 | | | | | | | | | | | | |
| 43 | HDPSP54 | 209782 | pCMVSport 3.0 | 221 | 536 | 1 | 536 | 179 | 179 | 510 | 1 | 41 | 42 | 55 |
| | | Apr. 20, 1998 | | | | | | | | | | | | |
| 44 | HDPUW68 | 203331 | pCMVSport 3.0 | 54 | 1748 | 1 | 1748 | 40 | 40 | 343 | 1 | 18 | 19 | 467 |
| | | Oct. 08, 1998 | | | | | | | | | | | | |
| 45 | HDPXY01 | PTA-868 | pCMVSport 3.0 | 55 | 766 | 1 | 766 | 23 | 23 | 344 | 1 | 37 | 38 | 98 |
| | | Oct. 26, 1999 | | | | | | | | | | | | |
| 45 | HDPXY01 | PTA-868 | pCMVSport 3.0 | 222 | 2409 | 1 | 2409 | 33 | 33 | 511 | 1 | 37 | 38 | 98 |
| | | Oct. 26, 1999 | | | | | | | | | | | | |
| 45 | HDPXY01 | PTA-868 | pCMVSport 3.0 | 223 | 737 | 1 | 423 | | 539 | 512 | 1 | 9 | 10 | 22 |
| | | Oct. 26, 1999 | | | | | | | | | | | | |
| 45 | HDPXY01 | PTA-868 | pCMVSport 3.0 | 224 | 1471 | 105 | 1471 | | 1190 | 513 | 1 | 16 | 17 | 25 |
| | | Oct. 26, 1999 | | | | | | | | | | | | |
| 46 | HDTBD53 | PTA-848 | pCMVSport 2.0 | 56 | 2803 | 1 | 2803 | 288 | 288 | 345 | 1 | 22 | 23 | 365 |
| | | Oct. 13, 1999 | | | | | | | | | | | | |
| 46 | HDTBD53 | PTA-848 | pCMVSport 2.0 | 225 | 3302 | 1 | 2718 | 292 | 292 | 514 | 1 | 22 | 23 | 365 |
| | | Oct. 13, 1999 | | | | | | | | | | | | |
| 47 | HDTBV77 | 203070 | pCMVSport 2.0 | 57 | 2181 | 1 | 2181 | 326 | 326 | 346 | 1 | 22 | 23 | 608 |
| | | Jul. 27, 1998 | | | | | | | | | | | | |
| 48 | HDTDQ23 | 209965 | pCMVSport 2.0 | 58 | 2207 | 1 | 2207 | 132 | 132 | 347 | 1 | 20 | 21 | 56 |
| | | Jun. 11, 1998 | | | | | | | | | | | | |
| 48 | HDTDQ23 | 209965 | pCMVSport 2.0 | 226 | 2227 | 1 | 2206 | 148 | 148 | 515 | 1 | 20 | 21 | 108 |
| | | Jun. 11, 1998 | | | | | | | | | | | | |
| 48 | HDTDQ23 | 209965 | pCMVSport 2.0 | 227 | 2214 | 1 | 2206 | 148 | 148 | 516 | 1 | 20 | 21 | 73 |
| | | Jun. 11, 1998 | | | | | | | | | | | | |
| 49 | HE2DE47 | 97923 | Uni-ZAP XR | 59 | 3533 | 2821 | 3532 | 808 | 808 | 348 | 1 | 30 | 31 | 540 |
| | | Mar. 07, 1997 | | | | | | | | | | | | |
| | | 209071 | | | | | | | | | | | | |
| | | May 22, 1997 | | | | | | | | | | | | |
| 49 | HE2DE47 | 97923 | Uni-ZAP XR | 228 | 1145 | 435 | 1115 | 515 | 515 | 517 | 1 | 22 | 23 | 81 |
| | | Mar. 07, 1997 | | | | | | | | | | | | |
| | | 209071 | | | | | | | | | | | | |
| | | May 22, 1997 | | | | | | | | | | | | |
| 50 | HE2NV57 | 209877 | Uni-ZAP XR | 60 | 867 | 1 | 867 | 99 | 99 | 349 | 1 | 36 | 37 | 99 |
| | | May 18, 1998 | | | | | | | | | | | | |
| 51 | HE2PH36 | 209603 | Uni-ZAP XR | 61 | 1558 | 1 | 1558 | 28 | 28 | 350 | 1 | 21 | 22 | 66 |
| | | Jan. 29, 1998 | | | | | | | | | | | | |
| 52 | HE8DS15 | PTA-1544 | Uni-ZAP XR | 62 | 2199 | 1 | 2199 | 91 | 91 | 351 | 1 | 24 | 25 | 72 |
| | | Mar. 21, 2000 | | | | | | | | | | | | |
| 53 | HE9HY07 | 209010 | Uni-ZAP XR | 63 | 832 | 1 | 832 | 35 | 35 | 352 | 1 | 26 | 27 | 41 |
| | | Apr. 28, 1997 | | | | | | | | | | | | |
| | | 209085 | | | | | | | | | | | | |
| | | May 29, 1997 | | | | | | | | | | | | |
| 54 | HEOMQ63 | 209563 | pSport1 | 64 | 1336 | 1 | 1336 | 123 | 123 | 353 | 1 | 23 | 24 | 47 |
| | | Dec. 18, 1997 | | | | | | | | | | | | |
| 55 | HEPAB80 | 209423 | Uni-ZAP XR | 65 | 799 | 1 | 799 | 73 | 73 | 354 | 1 | 28 | 29 | 121 |
| | | Oct. 30, 1997 | | | | | | | | | | | | |
| 55 | HEPAB80 | 209423 | Uni-ZAP XR | 229 | 802 | 1 | 802 | 67 | 67 | 518 | 1 | 28 | 29 | 122 |
| | | Oct. 30, 1997 | | | | | | | | | | | | |
| 56 | HFABH95 | 209407 | Uni-ZAP XR | 66 | 1347 | 1 | 1347 | 199 | 199 | 355 | 1 | 21 | 22 | 116 |
| | | Oct. 23, 1997 | | | | | | | | | | | | |
| 57 | HFAEF57 | 209277 | Uni-ZAP XR | 67 | 642 | 1 | 642 | 232 | 232 | 356 | 1 | 42 | 43 | 86 |
| | | Sep. 18, 1997 | | | | | | | | | | | | |
| 58 | HFCEB37 | 209008 | Uni-ZAP XR | 68 | 802 | 352 | 802 | | 487 | 357 | 1 | | | 10 |
| | | Apr. 28, 1997 | | | | | | | | | | | | |
| | | 209084 | | | | | | | | | | | | |
| | | May 29, 1997 | | | | | | | | | | | | |
| 59 | HFFAD59 | 209242 | Lambda ZAP II | 69 | 470 | 1 | 470 | 44 | 44 | 358 | 1 | 17 | 18 | 45 |
| | | Sep. 12, 1997 | | | | | | | | | | | | |
| 60 | HFGAD82 | 209225 | Uni-ZAP XR | 70 | 1881 | 772 | 1861 | 1019 | 1019 | 359 | 1 | 18 | 19 | 38 |
| | | Aug. 28, 1997 | | | | | | | | | | | | |
| 61 | HFIUR10 | 209277 | pSport1 | 71 | 541 | 1 | 541 | 50 | 50 | 360 | 1 | 22 | 23 | 44 |
| | | Sep. 18, 1997 | | | | | | | | | | | | |
| 62 | HFTBM50 | 209300 | Uni-ZAP XR | 72 | 762 | 1 | 740 | 158 | 158 | 361 | 1 | 20 | 21 | 34 |
| | | Sep. 25, 1997 | | | | | | | | | | | | |
| 63 | HFTDZ36 | 209300 | Uni-ZAP XR | 73 | 1103 | 231 | 1103 | 547 | 547 | 362 | 1 | 22 | 23 | 68 |
| | | Sep. 25, 1997 | | | | | | | | | | | | |
| 64 | HFXBL33 | 203071 | Lambda ZAP II | 74 | 1633 | 1 | 1633 | 152 | 152 | 363 | 1 | 24 | 25 | 162 |
| | | Jul. 27, 1998 | | | | | | | | | | | | |
| 65 | HFXJX44 | 209782 | Lambda ZAP II | 75 | 1384 | 1 | 1384 | 98 | 98 | 364 | 1 | 18 | 19 | 47 |
| | | Apr. 20, 1998 | | | | | | | | | | | | |
| 66 | HFXKT05 | 209651 | Lambda ZAP II | 76 | 1715 | 1 | 1715 | 204 | 204 | 365 | 1 | 18 | 19 | 79 |
| | | Mar. 04, 1998 | | | | | | | | | | | | |
| 67 | HGBHI35 | 209423 | Uni-ZAP XR | 77 | 1437 | 71 | 1276 | 87 | 87 | 366 | 1 | 16 | 17 | 292 |
| | | Oct. 30, 1997 | | | | | | | | | | | | |
| 68 | HGLAF75 | 209407 | Uni-ZAP XR | 78 | 776 | 1 | 776 | 231 | 231 | 367 | 1 | 28 | 29 | 121 |
| | | Oct. 23, 1997 | | | | | | | | | | | | |
| 69 | HHENV10 | 209368 | pCMVSport 3.0 | 79 | 1155 | 1 | 1155 | 143 | 143 | 368 | 1 | 27 | 28 | 50 |
| | | Oct. 16, 1997 | | | | | | | | | | | | |
| 70 | HHGCG53 | 97899 | Lambda ZAP II | 80 | 407 | 1 | 407 | 230 | 230 | 369 | 1 | 33 | 34 | 44 |
| | | Feb. 26, 1997 | | | | | | | | | | | | |
| | | 209045 | | | | | | | | | | | | |
| | | May 15, 1997 | | | | | | | | | | | | |
| 71 | HHGCM76 | 97958 | Lambda ZAP II | 81 | 711 | 8 | 711 | 270 | 270 | 370 | 1 | 22 | 23 | 89 |
| | | Mar. 13, 1997 | | | | | | | | | | | | |
| | | 209072 | | | | | | | | | | | | |
| | | May 22, 1997 | | | | | | | | | | | | |
| 71 | HHGCM76 | 97958 | Lambda ZAP II | 230 | 711 | 8 | 711 | 270 | 270 | 519 | 1 | | | 11 |
| | | Mar. 13, 1997 | | | | | | | | | | | | |
| | | 209072 | | | | | | | | | | | | |
| | | May 22, 1997 | | | | | | | | | | | | |
| 72 | HHPEN62 | 209746 | Uni-ZAP XR | 82 | 2152 | 141 | 2152 | 183 | 183 | 371 | 1 | 27 | 28 | 508 |
| | | Apr. 07, 1998 | | | | | | | | | | | | |
| 73 | HJABB94 | 209119 | pBluescript SK- | 83 | 1555 | 1 | 1555 | 74 | 74 | 372 | 1 | 28 | 29 | 77 |
| | | Jun. 12, 1997 | | | | | | | | | | | | |
| 74 | HJACG30 | PTA-843 | pBluescript SK- | 84 | 1532 | 1 | 1532 | 291 | 291 | 373 | 1 | 27 | 28 | 44 |
| | | Oct. 13, 1999 | | | | | | | | | | | | |
| 74 | HJACG30 | PTA-843 | pBluescript SK- | 231 | 1614 | 1020 | 1614 | | 50 | 520 | 1 | 1 | 2 | 130 |
| | | Oct. 13, 1999 | | | | | | | | | | | | |
| 74 | HJACG30 | PTA-843 | pBluescript SK- | 232 | 1087 | 491 | 1087 | | 350 | 521 | 1 | 1 | 2 | 122 |
| | | Oct. 13, 1999 | | | | | | | | | | | | |
| 75 | HJBCY35 | 209877 | pBluescript SK- | 85 | 1559 | 93 | 1272 | 232 | 232 | 374 | 1 | 23 | 24 | 327 |
| | | May 18, 1998 | | | | | | | | | | | | |
| 76 | HJPAD75 | 209641 | Uni-ZAP XR | 86 | 1231 | 1 | 1231 | 60 | 60 | 375 | 1 | 29 | 30 | 91 |
| | | Feb. 25, 1998 | | | | | | | | | | | | |
| 77 | HKABZ65 | 209683 | pCMVSport 2.0 | 87 | 1189 | 1 | 1189 | 77 | 77 | 376 | 1 | 17 | 18 | 243 |
| | | Mar. 20, 1998 | | | | | | | | | | | | |
| 77 | HKABZ65 | 209683 | pCMVSport 2.0 | 233 | 1191 | 1 | 1191 | 69 | 69 | 522 | 1 | 17 | 18 | 243 |
| | | Mar. 20, 1998 | | | | | | | | | | | | |
| 78 | HKACB56 | 209346 | pCMVSport 2.0 | 88 | 496 | 1 | 496 | 27 | 27 | 377 | 1 | 23 | 24 | 80 |
| | | Oct. 09, 1997 | | | | | | | | | | | | |
| 79 | HKACD58 | 209346 | pCMVSport 2.0 | 89 | 3153 | 1 | 3153 | 38 | 38 | 378 | 1 | 25 | 26 | 301 |
| | | Oct. 09, 1997 | | | | | | | | | | | | |
| 79 | HKACD58 | 209346 | pCMVSport 2.0 | 234 | 1626 | 1 | 1626 | 35 | 35 | 523 | 1 | 25 | 26 | 154 |
| | | Oct. 09, 1997 | | | | | | | | | | | | |
| 80 | HKAEV06 | 209627 | pCMVSport 2.0 | 90 | 2496 | 1 | 2496 | 501 | 501 | 379 | 1 | 30 | 31 | 438 |
| | | Feb. 12, 1998 | | | | | | | | | | | | |
| 80 | HKAEV06 | 209627 | pCMVSport 2.0 | 235 | 2351 | 1 | 2351 | 197 | 197 | 524 | 1 | 29 | 30 | 57 |
| | | Feb. 12, 1998 | | | | | | | | | | | | |
| 81 | HKAFT66 | PTA-849 | pCMVSport 2.0 | 91 | 1001 | 270 | 1001 | 508 | 508 | 380 | 1 | 41 | 42 | 107 |
| | | Oct. 13, 1999 | | | | | | | | | | | | |
| 81 | HKAFT66 | PTA-849 | pCMVSport 2.0 | 236 | 1001 | 270 | 1001 | 508 | 508 | 525 | 1 | 41 | 42 | 107 |
| | | Oct. 13, 1999 | | | | | | | | | | | | |
| 81 | HKAFT66 | PTA-849 | pCMVSport 2.0 | 237 | 669 | 1 | 669 | 234 | 234 | 526 | 1 | | | 37 |
| | | Oct. 13, 1999 | | | | | | | | | | | | |
| 82 | HKB1E57 | 209651 | pCMVSport 1 | 92 | 1142 | 1038 | 1142 | 178 | 178 | 381 | 1 | 30 | 31 | 234 |
| | | Mar. 04, 1998 | | | | | | | | | | | | |
| 82 | HKB1E57 | 209651 | pCMVSport 1 | 238 | 417 | 1 | 417 | 30 | 30 | 527 | 1 | 26 | 27 | 46 |
| | | Mar. 04, 1998 | | | | | | | | | | | | |
| 83 | HKFBC53 | 209782 | ZAP Express | 93 | 2238 | 1 | 2238 | 64 | 64 | 382 | 1 | 15 | 16 | 470 |
| | | Apr. 20, 1998 | | | | | | | | | | | | |
| 83 | HKFBC53 | 209782 | ZAP Express | 239 | 1949 | 1 | 1906 | 41 | 41 | 528 | 1 | 18 | 19 | 442 |
| | | Apr. 20, 1998 | | | | | | | | | | | | |
| 83 | HKFBC53 | 209782 | ZAP Express | 240 | 1487 | 1 | 1487 | | 3 | 529 | 1 | 1 | 2 | 309 |
| | | Apr. 20, 1998 | | | | | | | | | | | | |
| 83 | HKFBC53 | 209782 | ZAP Express | 241 | 1525 | 1 | 1525 | | 3 | 530 | 1 | 1 | 2 | 243 |
| | | Apr. 20, 1998 | | | | | | | | | | | | |
| 84 | HKGDL36 | 209877 | pSport1 | 94 | 1052 | 1 | 1052 | 53 | 53 | 383 | 1 | 33 | 34 | 260 |
| | | May 18, 1998 | | | | | | | | | | | | |
| 84 | HKGDL36 | 209877 | pSport1 | 242 | 1050 | 1 | 1050 | 55 | 55 | 531 | 1 | 33 | 34 | 148 |
| | | May 18, 1998 | | | | | | | | | | | | |
| 85 | HKISB57 | 209603 | pBluescript | 95 | 1492 | 1 | 1439 | 130 | 130 | 384 | 1 | 19 | 20 | 95 |
| | | Jan. 29, 1998 | | | | | | | | | | | | |
| 86 | HKMLM11 | 209236 | pBluescript | 96 | 954 | 1 | 954 | 82 | 82 | 385 | 1 | 20 | 21 | 130 |
| | | Sep. 04, 1997 | | | | | | | | | | | | |
| 87 | HKMMW74 | 209463 | pBluescript | 97 | 1794 | 1 | 1794 | 202 | 202 | 386 | 1 | 21 | 22 | 41 |
| | | Nov. 14, 1997 | | | | | | | | | | | | |
| 88 | HLDON23 | 209628 | pCMVSport 3.0 | 98 | 1262 | 208 | 1256 | 368 | 368 | 387 | 1 | 20 | 21 | 113 |
| | | Feb. 12, 1998 | | | | | | | | | | | | |
| 89 | HLDQR62 | 203027 | pCMVSport 3.0 | 99 | 2572 | 427 | 2572 | 520 | 520 | 388 | 1 | 18 | 19 | 161 |
| | | Jun. 26, 1998 | | | | | | | | | | | | |
| 90 | HLDQU79 | 203071 | pCMVSport 3.0 | 100 | 1488 | 1 | 1488 | 99 | 99 | 389 | 1 | 23 | 24 | 348 |
| | | Jul. 27, 1998 | | | | | | | | | | | | |
| 91 | HLHAL68 | 209746 | Uni-ZAP XR | 101 | 704 | 1 | 704 | 30 | 30 | 390 | 1 | 21 | 22 | 44 |
| | | Apr. 07, 1998 | | | | | | | | | | | | |
| 92 | HLIBD68 | 203071 | pCMVSport 1 | 102 | 1022 | 1 | 1022 | 186 | 186 | 391 | 1 | 35 | 36 | 50 |
| | | Jul. 27, 1998 | | | | | | | | | | | | |
| 93 | HLICQ90 | 203517 | pCMVSport 1 | 103 | 1766 | 1 | 1766 | 249 | 249 | 392 | 1 | 29 | 30 | 206 |
| | | Dec. 10, 1998 | | | | | | | | | | | | |
| 94 | HLTHR66 | 209782 | Uni-ZAP XR | 104 | 2286 | 1 | 2286 | 5 | 5 | 393 | 1 | 34 | 35 | 75 |
| | | Apr. 20, 1998 | | | | | | | | | | | | |
| 95 | HLTIP94 | PTA-2076 | Uni-ZAP XR | 105 | 1240 | 1 | 1170 | 226 | 226 | 394 | 1 | 26 | 27 | 97 |
| | | Jun. 09, 2000 | | | | | | | | | | | | |
| 95 | HLTIP94 | PTA-2076 | Uni-ZAP XR | 243 | 647 | 1 | 647 | 226 | 226 | 532 | 1 | 26 | 27 | 65 |
| | | Jun. 09, 2000 | | | | | | | | | | | | |
| 95 | HLTIP94 | PTA-2076 | Uni-ZAP XR | 244 | 1321 | 870 | 1209 | | 3 | 533 | 1 | 1 | 2 | 299 |
| | | Jun. 09, 2000 | | | | | | | | | | | | |
| 96 | HLWAA17 | 209626 | pCMVSport 3.0 | 106 | 997 | 246 | 997 | 436 | 436 | 395 | 1 | 15 | 16 | 187 |
| | | Feb. 12, 1998 | | | | | | | | | | | | |
| 97 | HLYAC95 | 203071 | pSport1 | 107 | 312 | 1 | 312 | 92 | 92 | 396 | 1 | 16 | 17 | 46 |
| | | Jul. 27, 1998 | | | | | | | | | | | | |
| 98 | HMADK33 | 209368 | Uni-ZAP XR | 108 | 864 | 1 | 864 | 161 | 161 | 397 | 1 | 24 | 25 | 152 |
| | | Oct. 16, 1997 | | | | | | | | | | | | |
| 99 | HMAMI15 | PTA-2075 | Uni-ZAP XR | 109 | 1258 | 1 | 1258 | 4 | 4 | 398 | 1 | 26 | 27 | 340 |
| | | Jun. 09, 2000 | | | | | | | | | | | | |
| 99 | HMAMI15 | PTA-2075 | Uni-ZAP XR | 245 | 1084 | 1 | 1084 | 3 | 3 | 534 | 1 | 26 | 27 | 306 |
| | | Jun. 09, 2000 | | | | | | | | | | | | |
| 100 | HMCFY13 | 209628 | Uni-ZAP XR | 110 | 883 | 1 | 883 | 175 | 175 | 399 | 1 | 27 | 28 | 64 |
| | | Feb. 12, 1998 | | | | | | | | | | | | |
| 101 | HMDAB56 | 209368 | Uni-ZAP XR | 111 | 1465 | 1 | 1465 | 273 | 273 | 400 | 1 | 32 | 33 | 44 |
| | | Oct. 16, 1997 | | | | | | | | | | | | |
| 102 | HMEED18 | 209368 | Lambda ZAP II | 112 | 1369 | 28 | 1369 | 34 | 34 | 401 | 1 | 34 | 35 | 221 |
| | | Oct. 16, 1997 | | | | | | | | | | | | |
| 103 | HMEFT54 | 209243 | Lambda ZAP II | 113 | 596 | 1 | 596 | 332 | 332 | 402 | 1 | 19 | 20 | 39 |
| | | Sep. 12, 1997 | | | | | | | | | | | | |
| 104 | HMEGF92 | 209243 | Lambda ZAP II | 114 | 629 | 1 | 611 | 92 | 92 | 403 | 1 | 27 | 28 | 62 |
| | | Sep. 12, 1997 | | | | | | | | | | | | |
| 105 | HMSDL37 | PTA-842 | Uni-ZAP XR | 115 | 2497 | 1 | 2497 | 531 | 531 | 404 | 1 | 26 | 27 | 64 |
| | | Oct. 13, 1999 | | | | | | | | | | | | |
| 105 | HMSDL37 | PTA-842 | Uni-ZAP XR | 246 | 1776 | 1 | 1776 | 528 | 528 | 535 | 1 | 26 | 27 | 64 |
| | | Oct. 13, 1999 | | | | | | | | | | | | |
| 105 | HMSDL37 | PTA-842 | Uni-ZAP XR | 247 | 784 | 1 | 784 | 565 | 565 | 536 | 1 | 6 | 7 | 26 |
| | | Oct. 13, 1999 | | | | | | | | | | | | |
| 105 | HMSDL37 | PTA-842 | Uni-ZAP XR | 248 | 699 | 275 | 427 | | 2 | 537 | 1 | 1 | 2 | 50 |
| | | Oct. 13, 1999 | | | | | | | | | | | | |
| 106 | HMSFI26 | 209368 | Uni-ZAP XR | 116 | 1217 | 1 | 1217 | 120 | 120 | 405 | 1 | 34 | 35 | 62 |
| | | Oct. 16, 1997 | | | | | | | | | | | | |
| 107 | HMVBS81 | 209628 | pSport1 | 117 | 529 | 1 | 529 | 34 | 34 | 406 | 1 | 43 | 44 | 139 |
| | | Feb. 12, 1998 | | | | | | | | | | | | |
| 108 | HMWDC28 | 209126 | Uni-ZAP XR | 118 | 1146 | 105 | 754 | 124 | 124 | 407 | 1 | 30 | 31 | 42 |
| | | Jun. 19, 1997 | | | | | | | | | | | | |
| 109 | HMWFT65 | 209368 | Uni-ZAP XR | 119 | 1346 | 1 | 1346 | 72 | 72 | 408 | 1 | 27 | 28 | 121 |
| | | Oct. 16, 1997 | | | | | | | | | | | | |
| 110 | HNEEE24 | 209346 | Uni-ZAP XR | 120 | 1079 | 1 | 1079 | 213 | 213 | 409 | 1 | 21 | 22 | 71 |
| | | Oct. 09, 1997 | | | | | | | | | | | | |
| 111 | HNFFC43 | 203027 | Uni-ZAP XR | 121 | 2103 | 209 | 2058 | 488 | 488 | 410 | 1 | 12 | 13 | 68 |
| | | Jun. 26, 1998 | | | | | | | | | | | | |
| 112 | HNFIY77 | 209628 | pBluescript | 122 | 1212 | 28 | 1212 | 228 | 228 | 411 | 1 | 34 | 35 | 233 |
| | | Feb. 12, 1998 | | | | | | | | | | | | |
| 113 | HNFJF07 | 209463 | Uni-ZAP XR | 123 | 616 | 1 | 616 | 86 | 86 | 412 | 1 | 21 | 22 | 66 |
| | | Nov. 14, 1997 | | | | | | | | | | | | |
| 114 | HNGFR31 | 209407 | Uni-ZAP XR | 124 | 536 | 1 | 536 | 108 | 108 | 413 | 1 | 23 | 24 | 90 |
| | | Oct. 23, 1997 | | | | | | | | | | | | |
| 115 | HNGIJ31 | 209236 | Uni-ZAP XR | 125 | 796 | 1 | 796 | 135 | 135 | 414 | 1 | 16 | 17 | 36 |
| | | Sep. 04, 1997 | | | | | | | | | | | | |
| 116 | HNGJE50 | 209368 | Uni-ZAP XR | 126 | 1037 | 1 | 1037 | 77 | 77 | 415 | 1 | 36 | 37 | 46 |
| | | Oct. 16, 1997 | | | | | | | | | | | | |
| 117 | HNGND37 | 203648 | Uni-ZAP XR | 127 | 841 | 1 | 841 | 388 | 388 | 416 | 1 | 27 | 28 | 82 |
| | | Feb. 09, 1999 | | | | | | | | | | | | |
| 118 | HNGOI12 | PTA-847 | Uni-ZAP XR | 128 | 2128 | 1 | 2128 | 27 | 27 | 417 | 1 | 34 | 35 | 57 |
| | | Oct. 13, 1999 | | | | | | | | | | | | |
| 118 | HNGOI12 | PTA-847 | Uni-ZAP XR | 249 | 774 | 1 | 774 | 27 | 27 | 538 | 1 | 34 | 35 | 57 |
| | | Oct. 13, 1999 | | | | | | | | | | | | |
| 118 | HNGOI12 | PTA-847 | Uni-ZAP XR | 250 | 1396 | 1 | 1396 | | 596 | 539 | 1 | 25 | 26 | 93 |
| | | Oct. 13, 1999 | | | | | | | | | | | | |
| 119 | HNHEU93 | 209628 | Uni-ZAP XR | 129 | 748 | 1 | 748 | 57 | 57 | 418 | 1 | 34 | 35 | 81 |
| | | Feb. 12, 1998 | | | | | | | | | | | | |
| 120 | HNHFM14 | 209683 | Uni-ZAP XR | 130 | 297 | 1 | 297 | 38 | 38 | 419 | 1 | 28 | 29 | 80 |
| | | Mar. 20, 1998 | | | | | | | | | | | | |
| 121 | HNHNB29 | PTA-623 | Uni-ZAP XR | 131 | 1894 | 1 | 1894 | 40 | 40 | 420 | 1 | 20 | 21 | 53 |
| | | Sep. 02, 1999 | | | | | | | | | | | | |
| 122 | HNHOD46 | PTA-1543 | Uni-ZAP XR | 132 | 1355 | 1 | 1355 | 12 | 12 | 421 | 1 | 20 | 21 | 80 |
| | | Mar. 21, 2000 | | | | | | | | | | | | |
| 123 | HNTBI26 | 209563 | pCMVSport 3.0 | 133 | 1382 | 1 | 1382 | 28 | 28 | 422 | 1 | 35 | 36 | 320 |
| | | Dec. 18, 1997 | | | | | | | | | | | | |
| 123 | HNTBI26 | 209563 | pCMVSport 3.0 | 251 | 1397 | 1 | 1397 | 32 | 32 | 540 | 1 | 35 | 36 | 172 |
| | | Dec. 18, 1997 | | | | | | | | | | | | |
| 123 | HNTBI26 | 209563 | pCMVSport 3.0 | 252 | 1368 | 1 | 1368 | 16 | 16 | 541 | 1 | 35 | 36 | 131 |
| | | Dec. 18, 1997 | | | | | | | | | | | | |
| 124 | HNTBL27 | 209324 | pCMVSport 3.0 | 134 | 791 | 71 | 791 | 100 | 100 | 423 | 1 | 23 | 24 | 115 |
| | | Oct. 02, 1997 | | | | | | | | | | | | |
| 125 | HNTCE26 | PTA-1544 | pCMVSport 3.0 | 135 | 2163 | 830 | 2163 | 111 | 111 | 424 | 1 | 30 | 31 | 402 |
| | | Mar. 21, 2000 | | | | | | | | | | | | |
| 125 | HNTCE26 | PTA-1544 | pCMVSport 3.0 | 253 | 1763 | 1 | 1763 | 57 | 57 | 542 | 1 | 28 | 29 | 121 |
| | | Mar. 21, 2000 | | | | | | | | | | | | |
| 126 | HNTNI01 | 209782 | pSport1 | 136 | 2087 | 1 | 2087 | 307 | 307 | 425 | 1 | 33 | 34 | 76 |
| | | Apr. 20, 1998 | | | | | | | | | | | | |
| 126 | HNTNI01 | 209782 | pSport1 | 254 | 1274 | 1 | 1114 | 306 | 306 | 543 | 1 | 33 | 34 | 49 |
| | | Apr. 20, 1998 | | | | | | | | | | | | |
| 127 | HODDF13 | 203069 | Uni-ZAP XR | 137 | 830 | 1 | 830 | 46 | 46 | 426 | 1 | 23 | 24 | 41 |
| | | Jul. 27, 1998 | | | | | | | | | | | | |
| 128 | HODDN92 | 209012 | Uni-ZAP XR | 138 | 1939 | 294 | 1939 | | 434 | 427 | 1 | 26 | 27 | 35 |
| | | Apr. 28, 1997 | | | | | | | | | | | | |
| | | 209089 | | | | | | | | | | | | |
| | | Jun. 05, 1997 | | | | | | | | | | | | |
| 129 | HOFMQ33 | PTA-848 | pCMVSport 2.0 | 139 | 2410 | 1 | 2410 | 49 | 49 | 428 | 1 | 24 | 25 | 484 |
| | | Oct. 13, 1999 | | | | | | | | | | | | |
| 129 | HOFMQ33 | PTA-848 | pCMVSport 2.0 | 255 | 2409 | 1 | 2409 | 48 | 48 | 544 | 1 | 24 | 25 | 484 |
| | | Oct. 13, 1999 | | | | | | | | | | | | |
| 129 | HOFMQ33 | PTA-848 | pCMVSport 2.0 | 256 | 876 | 1 | 876 | 78 | 78 | 545 | 1 | 24 | 25 | 266 |
| | | Oct. 13, 1999 | | | | | | | | | | | | |
| 129 | HOFMQ33 | PTA-848 | pCMVSport 2.0 | 257 | 1586 | 1 | 1586 | | 724 | 546 | 1 | | | 5 |
| | | Oct. 13, 1999 | | | | | | | | | | | | |
| 129 | HOFMQ33 | PTA-848 | pCMVSport 2.0 | 258 | 1011 | 873 | 1011 | | 123 | 547 | 1 | 1 | 2 | 84 |
| | | Oct. 13, 1999 | | | | | | | | | | | | |
| 130 | HOFOC73 | PTA-848 | pCMVSport 2.0 | 140 | 1491 | 1 | 1491 | 18 | 18 | 429 | 1 | 18 | 19 | 129 |
| | | Oct. 13, 1999 | | | | | | | | | | | | |
| 130 | HOFOC73 | PTA-848 | pCMVSport 2.0 | 259 | 1395 | 1 | 1395 | 23 | 23 | 548 | 1 | 18 | 19 | 67 |
| | | Oct. 13, 1999 | | | | | | | | | | | | |
| 130 | HOFOC73 | PTA-848 | pCMVSport 2.0 | 260 | 270 | 1 | 270 | | 127 | 549 | 1 | 4 | 5 | 14 |
| | | Oct. 13, 1999 | | | | | | | | | | | | |
| 130 | HOFOC73 | PTA-848 | pCMVSport 2.0 | 261 | 2324 | 662 | 2324 | 142 | 142 | 550 | 1 | | | 6 |
| | | Oct. 13, 1999 | | | | | | | | | | | | |
| 131 | HOQBJ82 | PTA-845 | Uni-ZAP XR | 141 | 3530 | 1 | 3530 | 361 | 361 | 430 | 1 | 21 | 22 | 164 |
| | | Oct. 13, 1999 | | | | | | | | | | | | |
| 131 | HOQBJ82 | PTA-845 | Uni-ZAP XR | 262 | 585 | 64 | 585 | 102 | 102 | 551 | 1 | 24 | 25 | 161 |
| | | Oct. 13, 1999 | | | | | | | | | | | | |
| 131 | HOQBJ82 | PTA-845 | Uni-ZAP XR | 263 | 4344 | 1339 | 1942 | | 55 | 552 | 1 | 1 | 2 | 325 |
| | | Oct. 13, 1999 | | | | | | | | | | | | |
| 132 | HOSBY40 | 209551 | Uni-ZAP XR | 142 | 1145 | 1 | 1145 | 89 | 89 | 431 | 1 | 30 | 31 | 56 |
| | | Dec. 12, 1997 | | | | | | | | | | | | |
| 133 | HOSDJ25 | 209423 | Uni-ZAP XR | 143 | 2214 | 985 | 2214 | 1076 | 1076 | 432 | 1 | 18 | 19 | 40 |
| | | Oct. 30, 1997 | | | | | | | | | | | | |
| 133 | HOSDJ25 | 209423 | Uni-ZAP XR | 264 | 1258 | 1 | 1258 | 146 | 146 | 553 | 1 | 18 | 19 | 40 |
| | | Oct. 30, 1997 | | | | | | | | | | | | |
| 134 | HPEAD79 | 209244 | Uni-ZAP XR | 144 | 813 | 1 | 813 | 51 | 51 | 433 | 1 | 15 | 16 | 41 |
| | | Sep. 12, 1997 | | | | | | | | | | | | |
| 135 | HPIBO15 | 209563 | Uni-ZAP XR | 145 | 1739 | 1 | 1739 | 128 | 128 | 434 | 1 | 18 | 19 | 211 |
| | | Dec. 18, 1997 | | | | | | | | | | | | |
| 135 | HPIBO15 | 209563 | Uni-ZAP XR | 265 | 1739 | 1 | 1739 | 127 | 127 | 554 | 1 | 18 | 19 | 173 |
| | | Dec. 18, 1997 | | | | | | | | | | | | |
| 136 | HPJBI33 | 209889 | Uni-ZAP XR | 146 | 1677 | 1 | 1677 | 236 | 236 | 435 | 1 | 31 | 32 | 53 |
| | | May 22, 1998 | | | | | | | | | | | | |
| 137 | HPJBK12 | PTA-855 | Uni-ZAP XR | 147 | 2648 | 1 | 2648 | 126 | 126 | 436 | 1 | 18 | 19 | 48 |
| | | Oct. 18, 1999 | | | | | | | | | | | | |
| 137 | HPJBK12 | PTA-855 | Uni-ZAP XR | 266 | 538 | 1 | 538 | 119 | 119 | 555 | 1 | 18 | 19 | 48 |
| | | Oct. 18, 1999 | | | | | | | | | | | | |
| 137 | HPJBK12 | PTA-855 | Uni-ZAP XR | 267 | 1346 | 1 | 1346 | | 969 | 556 | 1 | | | 10 |
| | | Oct. 18, 1999 | | | | | | | | | | | | |
| 137 | HPJBK12 | PTA-855 | Uni-ZAP XR | 268 | 912 | 1 | 912 | 509 | 509 | 557 | 1 | | | 4 |
| | | Oct. 18, 1999 | | | | | | | | | | | | |
| 138 | HPMDK28 | 209628 | Uni-ZAP XR | 148 | 1084 | 1 | 1084 | 64 | 64 | 437 | 1 | 25 | 26 | 201 |
| | | Feb. 12, 1998 | | | | | | | | | | | | |
| 138 | HPMDK28 | 209628 | Uni-ZAP XR | 269 | 1177 | 1 | 1083 | 58 | 58 | 558 | 1 | 25 | 26 | 201 |
| | | Feb. 12, 1998 | | | | | | | | | | | | |
| 139 | HPRAL78 | 209195 | Uni-ZAP XR | 149 | 2072 | 1 | 2072 | 62 | 62 | 438 | 1 | 29 | 30 | 420 |
| | | Aug. 01, 1997 | | | | | | | | | | | | |
| 139 | HPRAL78 | 209195 | Uni-ZAP XR | 270 | 1775 | 1038 | 1775 | 70 | 70 | 559 | 1 | 29 | 30 | 392 |
| | | Aug. 01, 1997 | | | | | | | | | | | | |
| 139 | HPRAL78 | 209195 | Uni-ZAP XR | 271 | 866 | 128 | 866 | 148 | 148 | 560 | 1 | 42 | 43 | 63 |
| | | Aug. 01, 1997 | | | | | | | | | | | | |
| 140 | HRABA80 | 209889 | pCMVSport 3.0 | 150 | 1251 | 1 | 1251 | 144 | 144 | 439 | 1 | 27 | 28 | 102 |
| | | May 22, 1998 | | | | | | | | | | | | |
| 140 | HRABA80 | 209889 | pCMVSport 3.0 | 272 | 1237 | 1 | 1237 | 130 | 130 | 561 | 1 | 27 | 28 | 102 |
| | | May 22, 1998 | | | | | | | | | | | | |
| 141 | HRACD15 | 209852 | pCMVSport 3.0 | 151 | 1539 | 24 | 1539 | 252 | 252 | 440 | 1 | 40 | 41 | 53 |
| | | May 07, 1998 | | | | | | | | | | | | |
| 141 | HRACD15 | 209852 | pCMVSport 3.0 | 273 | 1681 | 24 | 1453 | 252 | 252 | 562 | 1 | 40 | 41 | 53 |
| | | May 07, 1998 | | | | | | | | | | | | |
| 142 | HRACJ35 | 209878 | pCMVSport 3.0 | 152 | 2077 | 1 | 2077 | 132 | 132 | 441 | 1 | 24 | 25 | 472 |
| | | May 18, 1998 | | | | | | | | | | | | |
| 142 | HRACJ35 | 209878 | pCMVSport 3.0 | 274 | 1863 | 8 | 1863 | 99 | 99 | 563 | 1 | 24 | 25 | 472 |
| | | May 18, 1998 | | | | | | | | | | | | |
| 142 | HRACJ35 | 209878 | pCMVSport 3.0 | 275 | 1134 | 1 | 1134 | | 1 | 564 | 1 | 1 | 2 | 178 |
| | | May 18, 1998 | | | | | | | | | | | | |
| 143 | HRGBL78 | PTA-841 | Uni-ZAP XR | 153 | 2108 | 1 | 2108 | 30 | 30 | 442 | 1 | 27 | 28 | 359 |
| | | Oct. 13, 1999 | | | | | | | | | | | | |
| 143 | HRGBL78 | PTA-841 | Uni-ZAP XR | 276 | 626 | 8 | 626 | 30 | 30 | 565 | 1 | 38 | 39 | 199 |
| | | Oct. 13, 1999 | | | | | | | | | | | | |
| 143 | HRGBL78 | PTA-841 | Uni-ZAP XR | 277 | 152 | 1 | 152 | | 11 | 566 | 1 | | | 2 |
| | | Oct. 13, 1999 | | | | | | | | | | | | |
| 143 | HRGBL78 | PTA-841 | Uni-ZAP XR | 278 | 1760 | 127 | 1760 | | 1048 | 567 | 1 | 10 | 11 | 32 |
| | | Oct. 13, 1999 | | | | | | | | | | | | |
| 144 | HROAJ39 | PTA-2069 | Uni-ZAP XR | 154 | 1146 | 224 | 1146 | 10 | 10 | 443 | 1 | 30 | 31 | 379 |
| | | Jun. 09, 2000 | | | | | | | | | | | | |
| 144 | HROAJ39 | PTA-2069 | Uni-ZAP XR | 279 | 880 | 1 | 880 | 31 | 31 | 568 | 1 | 15 | 16 | 283 |
| | | Jun. 09, 2000 | | | | | | | | | | | | |
| 144 | HROAJ39 | PTA-2069 | Uni-ZAP XR | 280 | 1106 | 224 | 1106 | 247 | 247 | 569 | 1 | 15 | 16 | 286 |
| | | Jun. 09, 2000 | | | | | | | | | | | | |
| 145 | HROBD68 | 203499 | Uni-ZAP XR | 155 | 1998 | 1 | 1998 | 122 | 122 | 444 | 1 | 22 | 23 | 48 |
| | | Dec. 01, 1998 | | | | | | | | | | | | |
| 146 | HSAWD74 | 209126 | Uni-ZAP XR | 156 | 970 | 106 | 970 | 142 | 142 | 445 | 1 | 26 | 27 | 142 |
| | | Jun. 19, 1997 | | | | | | | | | | | | |
| 146 | HSAWD74 | 209126 | Uni-ZAP XR | 281 | 646 | 1 | 646 | 122 | 122 | 570 | 1 | 29 | 30 | 45 |
| | | Jun. 19, 1997 | | | | | | | | | | | | |
| 147 | HSDEK49 | 209603 | Uni-ZAP XR | 157 | 1782 | 1 | 1782 | 60 | 60 | 446 | 1 | 19 | 20 | 399 |
| | | Jan. 29, 1998 | | | | | | | | | | | | |
| 147 | HSDEK49 | 209603 | Uni-ZAP XR | 282 | 1590 | 96 | 1590 | 126 | 126 | 571 | 1 | 21 | 22 | 305 |
| | | Jan. 29, 1998 | | | | | | | | | | | | |
| 148 | HSDFJ26 | 203648 | Uni-ZAP XR | 158 | 1205 | 23 | 1179 | 99 | 99 | 447 | 1 | 20 | 21 | 223 |
| | | Feb. 09, 1999 | | | | | | | | | | | | |
| 148 | HSDFJ26 | 203648 | Uni-ZAP XR | 283 | 1179 | 1 | 1179 | 99 | 99 | 572 | 1 | 19 | 20 | 72 |
| | | Feb. 09, 1999 | | | | | | | | | | | | |
| 149 | HSDSB09 | 209145 | pBluescript | 159 | 809 | 1 | 809 | 16 | 16 | 448 | 1 | 17 | 18 | 135 |
| | | Jul. 17, 1997 | | | | | | | | | | | | |
| 149 | HSDSB09 | 209145 | pBluescript | 284 | 819 | 1 | 819 | 22 | 22 | 573 | 1 | 17 | 18 | 121 |
| | | Jul. 17, 1997 | | | | | | | | | | | | |
| 150 | HSDSE75 | 209324 | pBluescript | 160 | 1151 | 1 | 1151 | 160 | 160 | 449 | 1 | 18 | 19 | 181 |
| | | Oct. 02, 1997 | | | | | | | | | | | | |
| 151 | HSIDJ81 | 209551 | Uni-ZAP XR | 161 | 1303 | 1 | 1303 | 8 | 8 | 450 | 1 | 22 | 23 | 58 |
| | | Dec. 12, 1997 | | | | | | | | | | | | |
| 152 | HSKDA27 | PTA-322 | Uni-ZAP XR | 162 | 4412 | 1 | 4412 | 786 | 786 | 451 | 1 | 24 | 25 | 950 |
| | | Jul. 09, 1999 | | | | | | | | | | | | |
| 152 | HSKDA27 | PTA-322 | Uni-ZAP XR | 285 | 1792 | 134 | 1792 | 127 | 127 | 574 | 1 | 21 | 22 | 509 |
| | | Jul. 09, 1999 | | | | | | | | | | | | |
| 152 | HSKDA27 | PTA-322 | Uni-ZAP XR | 286 | 1673 | 1 | 1673 | 12 | 12 | 575 | 1 | 21 | 22 | 554 |
| | | Jul. 09, 1999 | | | | | | | | | | | | |
| 153 | HSKGN81 | 97977 | pBluescript | 163 | 1907 | 151 | 1432 | 353 | 353 | 452 | 1 | 23 | 24 | 260 |
| | | Apr. 04, 1997 | | | | | | | | | | | | |
| | | 209082 | | | | | | | | | | | | |
| | | May 29, 1997 | | | | | | | | | | | | |
| 153 | HSKGN81 | 97977 | pBluescript | 287 | 2084 | 335 | 2084 | 537 | 537 | 576 | 1 | 18 | 19 | 23 |
| | | Apr. 04, 1997 | | | | | | | | | | | | |
| | | 209082 | | | | | | | | | | | | |
| | | May 29, 1997 | | | | | | | | | | | | |
| 154 | HSNAD72 | 209139 | Uni-ZAP XR | 164 | 861 | 1 | 861 | 220 | 220 | 453 | 1 | 19 | 20 | 35 |
| | | Jul. 03, 1997 | | | | | | | | | | | | |
| 155 | HSNMC45 | 209300 | Uni-ZAP XR | 165 | 587 | 1 | 587 | 225 | 225 | 454 | 1 | 18 | 19 | 55 |
| | | Sep. 25, 1997 | | | | | | | | | | | | |
| 155 | HSNMC45 | 209300 | Uni-ZAP XR | 288 | 720 | 1 | 720 | 232 | 232 | 577 | 1 | 17 | 18 | 25 |
| | | Sep. 25, 1997 | | | | | | | | | | | | |
| 156 | HSQFP66 | 209126 | Uni-ZAP XR | 166 | 477 | 1 | 477 | 96 | 96 | 455 | 1 | 32 | 33 | 78 |
| | | Jun. 19, 1997 | | | | | | | | | | | | |
| 157 | HSRFZ57 | PTA-622 | Uni-ZAP XR | 167 | 1930 | 1 | 1925 | 82 | 82 | 456 | 1 | 18 | 19 | 41 |
| | | Sep. 02, 1999 | | | | | | | | | | | | |
| 158 | HSUBW09 | 209007 | Uni-ZAP XR | 168 | 1021 | 1 | 1021 | 153 | 153 | 457 | 1 | 31 | 32 | 56 |
| | | Apr. 28, 1997 | | | | | | | | | | | | |
| | | 209083 | | | | | | | | | | | | |
| | | May 29, 1997 | | | | | | | | | | | | |
| 159 | HSVBU91 | 209603 | Uni-ZAP XR | 169 | 727 | 1 | 727 | 256 | 256 | 458 | 1 | 18 | 19 | 90 |
| | | Jan. 29, 1998 | | | | | | | | | | | | |
| 160 | HTAEE28 | PTA-843 | Uni-ZAP XR | 170 | 1341 | 1 | 1341 | 319 | 319 | 459 | 1 | 33 | 34 | 282 |
| | | Oct. 13, 1999 | | | | | | | | | | | | |
| 160 | HTAEE28 | PTA-843 | Uni-ZAP XR | 289 | 738 | 159 | 738 | 372 | 372 | 578 | 1 | 33 | 34 | 122 |
| | | Oct. 13, 1999 | | | | | | | | | | | | |
| 160 | HTAEE28 | PTA-843 | Uni-ZAP XR | 290 | 935 | 1 | 807 | | 124 | 579 | 1 | 1 | 2 | 216 |
| | | Oct. 13, 1999 | | | | | | | | | | | | |
| 161 | HTECC05 | 209877 | Uni-ZAP XR | 171 | 839 | 1 | 839 | 13 | 13 | 460 | 1 | 15 | 16 | 178 |
| | | May 18, 1998 | | | | | | | | | | | | |
| 161 | HTECC05 | 209877 | Uni-ZAP XR | 291 | 871 | 1 | 871 | 21 | 21 | 580 | 1 | 15 | 16 | 127 |
| | | May 18, 1998 | | | | | | | | | | | | |
| 161 | HTECC05 | 209877 | Uni-ZAP XR | 292 | 881 | 1 | 881 | 27 | 27 | 581 | 1 | 15 | 16 | 164 |
| | | May 18, 1998 | | | | | | | | | | | | |
| 162 | HTEEB42 | 97922 | Uni-ZAP XR | 172 | 1022 | 20 | 1022 | 59 | 59 | 461 | 1 | 22 | 23 | 298 |
| | | Mar. 07, 1997 | | | | | | | | | | | | |
| | | 209070 | | | | | | | | | | | | |
| | | May 22, 1997 | | | | | | | | | | | | |
| 163 | HTEFU65 | 209324 | Uni-ZAP XR | 173 | 1028 | 1 | 1028 | 231 | 231 | 462 | 1 | 24 | 25 | 46 |
| | | Oct. 02, 1997 | | | | | | | | | | | | |
| 164 | HTELP17 | 203648 | Uni-ZAP XR | 174 | 808 | 1 | 808 | 164 | 164 | 463 | 1 | 20 | 21 | 44 |
| | | Feb. 09, 1999 | | | | | | | | | | | | |
| 165 | HTELS08 | PTA-1544 | Uni-ZAP XR | 175 | 1898 | 1 | 1898 | 15 | 15 | 464 | 1 | 17 | 18 | 158 |
| | | Mar. 21, 2000 | | | | | | | | | | | | |
| 166 | HTLEP53 | 209641 | Uni-ZAP XR | 176 | 818 | 1 | 818 | 73 | 73 | 465 | 1 | 43 | 44 | 101 |
| | | Feb. 25, 1998 | | | | | | | | | | | | |
| 167 | HTPCS72 | 209423 | Uni-ZAP XR | 177 | 3435 | 2141 | 3431 | 2365 | 2365 | 466 | 1 | 29 | 30 | 71 |
| | | Oct. 30, 1997 | | | | | | | | | | | | |
| 167 | HTPCS72 | 209423 | Uni-ZAP XR | 293 | 1598 | 306 | 1598 | 530 | 530 | 582 | 1 | 29 | 30 | 71 |
| | | Oct. 30, 1997 | | | | | | | | | | | | |
| 168 | HTPIH83 | PTA-871 | Uni-ZAP XR | 178 | 1481 | 1 | 1481 | 118 | 118 | 467 | 1 | 24 | 25 | 230 |
| | | Oct. 26, 1999 | | | | | | | | | | | | |
| 168 | HTPIH83 | PTA-871 | Uni-ZAP XR | 294 | 530 | 1 | 530 | 111 | 111 | 583 | 1 | 24 | 25 | 140 |
| | | Oct. 26, 1999 | | | | | | | | | | | | |
| 168 | HTPIH83 | PTA-871 | Uni-ZAP XR | 295 | 1046 | 359 | 1046 | | 96 | 584 | 1 | 1 | 2 | 86 |
| | | Oct. 26, 1999 | | | | | | | | | | | | |
| 169 | HTSEW17 | 209138 | pBluescript | 179 | 652 | 1 | 652 | 170 | 170 | 468 | 1 | 34 | 35 | 37 |
| | | Jul. 03, 1997 | | | | | | | | | | | | |
| 170 | HTTBI76 | 209641 | Uni-ZAP XR | 180 | 1711 | 1 | 1711 | 133 | 133 | 469 | 1 | 22 | 23 | 133 |
| | | Feb. 25, 1998 | | | | | | | | | | | | |
| 171 | HTTBS64 | PTA-841 | Uni-ZAP XR | 181 | 2058 | 1 | 2058 | 95 | 95 | 470 | 1 | 17 | 18 | 42 |
| | | Oct. 13, 1999 | | | | | | | | | | | | |
| 171 | HTTBS64 | PTA-841 | Uni-ZAP XR | 296 | 819 | 1 | 819 | 100 | 100 | 585 | 1 | 17 | 18 | 42 |
| | | Oct. 13, 1999 | | | | | | | | | | | | |
| 171 | HTTBS64 | PTA-841 | Uni-ZAP XR | 297 | 501 | 1 | 501 | | 175 | 586 | 1 | 1 | 2 | 76 |
| | | Oct. 13, 1999 | | | | | | | | | | | | |
| 172 | HTXJM03 | 209580 | Uni-ZAP XR | 182 | 2398 | 211 | 2398 | 328 | 328 | 471 | 1 | 18 | 19 | 56 |
| | | Jan. 14, 1998 | | | | | | | | | | | | |
| 173 | HTXON32 | 203648 | Uni-ZAP XR | 183 | 1505 | 1 | 1505 | 72 | 72 | 472 | 1 | 22 | 23 | 52 |
| | | Feb. 09, 1999 | | | | | | | | | | | | |
| 174 | HUFCJ30 | 209641 | pSport1 | 184 | 868 | 1 | 868 | 123 | 123 | 473 | 1 | 29 | 30 | 50 |
| | | Feb. 25, 1998 | | | | | | | | | | | | |
| 175 | HUVEB53 | 209603 | Uni-ZAP XR | 185 | 1502 | 1 | 1502 | 14 | 14 | 474 | 1 | 20 | 21 | 45 |
| | | Jan. 29, 1998 | | | | | | | | | | | | |
| 176 | HWAAD63 | 203570 | pCMVSport 3.0 | 186 | 3308 | 1 | 3308 | 322 | 322 | 475 | 1 | 30 | 31 | 168 |
| | | Jan. 11, 1999 | | | | | | | | | | | | |
| 176 | HWAAD63 | 203570 | pCMVSport 3.0 | 298 | 3306 | 1 | 3306 | 322 | 322 | 587 | 1 | 30 | 31 | 53 |
| | | Jan. 11, 1999 | | | | | | | | | | | | |
| 176 | HWAAD63 | 203570 | pCMVSport 3.0 | 299 | 2194 | 1 | 2194 | 312 | 312 | 588 | 1 | 30 | 31 | 169 |
| | | Jan. 11, 1999 | | | | | | | | | | | | |
| 177 | HWADJ89 | PTA-1543 | pCMVSport 3.0 | 187 | 1769 | 529 | 1769 | 581 | 581 | 476 | 1 | 1 | 2 | 43 |
| | | Mar. 21, 2000 | | | | | | | | | | | | |
| 178 | HWBFX31 | PTA-1543 | pCMVSport 3.0 | 188 | 1677 | 1 | 1677 | 271 | 271 | 477 | 1 | 1 | 2 | 52 |
| | | Mar. 21, 2000 | | | | | | | | | | | | |

[0115] Table 1B (Comprised of Tables 1B.1 and 1B.2)

[0116] The first column in Table 1B.1 and Table 1B.2 provides the gene number in the application corresponding to the clone identifier. The second column in Table 1B.1 and Table 1B.2 provides a unique “Clone ID:” for the cDNA clone related to each contig sequence disclosed in Table 1B.1 and Table 1B.2. This clone ID references the cDNA clone which contains at least the 5′ most sequence of the assembled contig and at least a portion of SEQ ID NO:X as determined by directly sequencing the referenced clone. The referenced clone may have more sequence than described in the sequence listing or the clone may have less. In the vast majority of cases, however, the clone is believed to encode a full-length polypeptide. In the case where a clone is not full-length, a full-length cDNA can be obtained by methods described elsewhere herein. The third column in Table 1B.1 and Table 1B.2 provides a unique “Contig ID” identification for each contig sequence. The fourth column in Table 1B.1 and Table 1B.2 provides the “SEQ ID NO:” identifier for each of the contig polynucleotide sequences disclosed in Table 1B.

[0117] Table 1B.1

[0118] The fifth column in Table 1B.1, “ORF (From-To)”, provides the location (i.e., nucleotide position numbers) within the polynucleotide sequence “SEQ ID NO:X” that delineate the preferred open reading frame (ORF) shown in the sequence listing and referenced in Table 1B.1, column 6, as SEQ ID NO:Y. Where the nucleotide position number “To” is lower than the nucleotide position number “From”, the preferred ORF is the reverse complement of the referenced polynucleotide sequence. The sixth column in Table 1B.1 provides the corresponding SEQ ID NO:Y for the polypeptide sequence encoded by the preferred ORF delineated in column 5. In one embodiment, the invention provides an amino acid sequence comprising, or alternatively consisting of, a polypeptide encoded by the portion of SEQ ID NO:X delineated by “ORF (From-To)”. Also provided are polynucleotides encoding such amino acid sequences and the complementary strand thereto. Column 7 in Table 1B.1 lists residues comprising epitopes contained in the polypeptides encoded by the preferred ORF (SEQ ID NO:Y), as predicted using the algorithm of Jameson and Wolf, (1988) Comp. Appl. Biosci. 4:181-186. The Jameson-Wolf antigenic analysis was performed using the computer program PROTEAN (Version 3.11 for the Power MacIntosh, DNASTAR, Inc., 1228 South Park Street Madison, Wis.). In specific embodiments, polypeptides of the invention comprise, or alternatively consist of, at least one, two, three, four, five or more of the predicted epitopes as described in Table 1B. It will be appreciated that depending on the analytical criteria used to predict antigenic determinants, the exact address of the determinant may vary slightly.

[0119] Column 8 in Table 1B.1 provides a chromosomal map location for certain polynucleotides of the invention. Chromosomal location was determined by finding exact matches to EST and cDNA sequences contained in the NCBI (National Center for Biotechnology Information) UniGene database. Each sequence in the UniGene database is assigned to a “cluster”; all of the ESTs, cDNAs, and STSs in a cluster are believed to be derived from a single gene. Chromosomal mapping data is often available for one or more sequence(s) in a UniGene cluster; this data (if consistent) is then applied to the cluster as a whole. Thus, it is possible to infer the chromosomal location of a new polynucleotide sequence by determining its identity with a mapped UniGene cluster.

[0120] A modified version of the computer program BLASTN (Altshul, et al., J. Mol. Biol. 215:403-410 (1990), and Gish, and States, Nat. Genet. 3:266-272) (1993) was used to search the UniGene database for EST or cDNA sequences that contain exact or near-exact matches to a polynucleotide sequence of the invention (the ‘Query’). A sequence from the UniGene database (the ‘Subject’) was said to be an exact match if it contained a segment of 50 nucleotides in length such that 48 of those nucleotides were in the same order as found in the Query sequence. If all of the matches that met this criteria were in the same UniGene cluster, and mapping data was available for this cluster, it is indicated in Table 1B under the heading “Cytologic Band”. Where a cluster had been further localized to a distinct cytologic band, that band is disclosed; where no banding information was available, but the gene had been localized to a single chromosome, the chromosome is disclosed.

[0121] Once a presumptive chromosomal location was determined for a polynucleotide of the invention, an associated disease locus was identified by comparison with a database of diseases which have been experimentally associated with genetic loci. The database used was the Morbid Map, derived from OMIM™ and National Center for Biotechnology Information, National Library of Medicine (Bethesda, Md.) 2000;. If the putative chromosomal location of a polynucleotide of the invention (Query sequence) was associated with a disease in the Morbid Map database, an OMIM reference identification number was noted in column 9, Table 1B.1, labelled “OMIM Disease Reference(s). Table 5 is a key to the OMIM reference identification numbers (column 1), and provides a description of the associated disease in Column 2.

[0122] Table 1B.2

[0123] Column 5, in Table 1B.2, provides an expression profile and library code:count for each of the contig sequences (SEQ ID NO:X) disclosed in Table 1B, which can routinely be combined with the information provided in Table 4 and used to determine the tissues, cells, and/or cell line libraries which predominantly express the polynucleotides of the invention. The first number in Table 1B.2, column 5 (preceding the colon), represents the tissue/cell source identifier code corresponding to the code and description provided in Table 4. The second number in column 5 (following the colon) represents the number of times a sequence corresponding to the reference polynucleotide sequence was identified in the corresponding tissue/cell source. Those tissue/cell source identifier codes in which the first two letters are “AR” designate information generated using DNA array technology. Utilizing this technology, cDNAs were amplified by PCR and then transferred, in duplicate, onto the array. Gene expression was assayed through hybridization of first strand cDNA probes to the DNA array. cDNA probes were generated from total RNA extracted from a variety of different tissues and cell lines. Probe synthesis was performed in the presence of ³³P dCTP, using oligo (dT) to prime reverse transcription. After hybridization, high stringency washing conditions were employed to remove non-specific hybrids from the array. The remaining signal, emanating from each gene target, was measured using a Phosphorimager. Gene expression was reported as Phosphor Stimulating Luminescence (PSL) which reflects the level of phosphor signal generated from the probe hybridized to each of the gene targets represented on the array. A local background signal subtraction was performed before the total signal generated from each array was used to normalize gene expression between the different hybridizations. The value presented after “[array code]:” represents the mean of the duplicate values, following background subtraction and probe normalization. One of skill in the art could routinely use this information to identify normal and/or diseased tissue(s) which show a predominant expression pattern of the corresponding polynucleotide of the invention or to identify polynucleotides which show predominant and/or specific tissue and/or cell expression.

TABLE 1B.1

| | | | | | AA | | | |
|---|---|---|---|---|---|---|---|---|
| | | | | | SEQ | | | OMIM |
| Gene | cDNA Clone | Contig | SEQ ID | ORF | ID | | Cytologic | Disease |
| No: | ID | ID: | NO: X | (From-To) | NO: Y | Predicted Epitopes | Band | Reference(s): |
| 1 | H2CBU83 | 884134 | 11 | 157-777 | 300 | Pro-62 to Asp-67, | 11p14-p13 | 102772, 106210, 106210, 106210, 106210, |
| | | | | | | Arg-74 to Gly-80, | | 107271, 114550, 115500, 136530, 151390, |
| | | | | | | Gln-146 to Glu-168. | | 179615, 179615, 179616, 180385, 194070, |
| | | | | | | | | 194070, 194070, 245349, 602092 |
| | H2CBU83 | 745366 | 189 | 157-312 | 478 | | | |
| 2 | H6EDC19 | 543259 | 12 | 389-733 | 301 | Arg-5 to Pro-12. | | |
| 3 | HACBD91 | 637482 | 13 | 117-266 | 302 | | 3q13.33 | 600882 |
| 4 | HAGAQ26 | 561996 | 14 | 251-439 | 303 | | 7q33 | 180105, 222800 |
| 5 | HAGDS35 | 1352199 | 15 | 45-410 | 304 | Leu-31 to Phe-38, | | |
| | | | | | | Glu-47 to Trp-52. | | |
| | HAGDS35 | 543617 | 190 | 52-405 | 479 | Leu-31 to Phe-38, | | |
| | | | | | | Glu-47 to Trp-52. | | |
| 6 | HAJAN23 | 1352364 | 16 | 109-1797 | 305 | Pro-186 to Tyr-196, | 5q12-q13 | 126060, 143200, 143200, 181510, 253200, |
| | | | | | | Leu-294 to Leu-300, | | 268800, 268800, 600354, 600354, 600354, |
| | | | | | | Ser-380 to Thr-385, | | 600887 |
| | | | | | | Thr-486 to Ser-499, | | |
| | | | | | | Phe-513 to Ser-522. | | |
| | HAJAN23 | 872551 | 191 | 120-629 | 480 | | | |
| 7 | HAJBR69 | 638516 | 17 | 262-423 | 306 | | | |
| 8 | HAMFE15 | 905695 | 18 | 1495-2757 | 307 | Leu-8 to Thr-16, | 7q34 | 180105, 222800, 274180 |
| | | | | | | Gly-93 to Ala-105, | | |
| | | | | | | Arg-136 to Thr-142, | | |
| | | | | | | Lys-195 to Gln-200, | | |
| | | | | | | Lys-241 to His-247, | | |
| | | | | | | Gly-255 to Gln-270, | | |
| | | | | | | Gln-288 to Leu-293, | | |
| | | | | | | Thr-316 to Asp-328, | | |
| | | | | | | Gly-348 to Pro-355, | | |
| | | | | | | Asp-408 to Met-415. | | |
| | HAMFE15 | 823350 | 192 | 226-369 | 481 | Ser-39 to Asn-47. | | |
| 9 | HAMGR28 | 892971 | 19 | 98-823 | 308 | Ala-27 to Asp-34, | | |
| | | | | | | Tyr-116 to Leu-125. | | |
| | HAMGR28 | 748223 | 193 | 40-651 | 482 | Ala-27 to Asp-34, | | |
| | | | | | | Tyr-116 to Leu-125, | | |
| | | | | | | Arg-185 to Cys-194. | | |
| 10 | HAPOM49 | 769555 | 20 | 251-817 | 309 | Gln-23 to Asp-30, | | |
| | | | | | | Lys-66 to Cys-87. | | |
| | HAPOM49 | 722386 | 194 | 448-816 | 483 | Met-1 to Cys-21, | | |
| | | | | | | Cys-41 to Asp-59, | | |
| | | | | | | Pro-104 to His-116. | | |
| 11 | HATBR65 | 635514 | 21 | 252-446 | 310 | Ile-25 to Trp-30. | | |
| 12 | HAUAI83 | 639009 | 22 | 253-399 | 311 | Asn-34 to Lys-42. | 19 | |
| | HAUAI83 | 383592 | 195 | 575-643 | 484 | Ala-17 to Lys-23. | | |
| 13 | HBAMB15 | 671835 | 23 | 390-569 | 312 | | 2p16 | 126600, 126600, 136435, 160980, 600678 |
| 14 | HBGBA69 | 1352289 | 24 | 124-843 | 313 | Pro-51 to Asp-56, | | |
| | | | | | | Gly-95 to Thr-105, | | |
| | | | | | | Val-132 to Ala-138, | | |
| | | | | | | Pro-229 to Leu-240. | | |
| | HBGBA69 | 709658 | 196 | 62-244 | 485 | Thr-52 to Gly-57. | | |
| 15 | HBIAE26 | 514418 | 25 | 75-194 | 314 | Ser-22 to Lys-27. | | |
| 16 | HBINS58 | 1352386 | 26 | 57-578 | 315 | Gly-32 to Gly-37, | 1 | |
| | | | | | | Glu-78 to His-87, | | |
| | | | | | | Tyr-102 to Ala-107, | | |
| | | | | | | Pro-115 to Val-122, | | |
| | | | | | | Lys-164 to Tyr-170. | | |
| | HBINS58 | 961712 | 197 | 71-592 | 486 | Gly-32 to Gly-37, | | |
| | | | | | | Glu-78 to His-87, | | |
| | | | | | | Tyr-102 to Ala-107, | | |
| | | | | | | Pro-115 to Val-122, | | |
| | | | | | | Lys-164 to Gln-171. | | |
| | HBINS58 | 892924 | 198 | 100-732 | 487 | Gly-32 to Gly-37, | | |
| | | | | | | Glu-78 to His-87, | | |
| | | | | | | Tyr-102 to Ala-107, | | |
| | | | | | | Pro-115 to Val-122. | | |
| 17 | HBNAW17 | 526797 | 27 | 77-262 | 316 | | | |
| 18 | HCE2F54 | 634016 | 28 | 166-1125 | 317 | His-44 to Pro-50, | 16q22.1 | 103850, 114835, 116800, 140100, 140100, |
| | | | | | | Glu-90 to Glu-96, | | 192090, 192090, 192090, 192090, 245900, |
| | | | | | | Gln-111 to Glu-117, | | 245900, 276600, 600223 |
| | | | | | | Ser-143 to Gly-151, | | |
| | | | | | | Ala-154 to Leu-166, | | |
| | | | | | | Pro-199 to Ala-216, | | |
| | | | | | | Gly-264 to Asp-272. | | |
| 19 | HCE3G69 | 728432 | 29 | 165-1175 | 318 | Lys-50 to Asp-66, | 2q36.1 | 120070, 120131, 120131, 138030, 259900 |
| | | | | | | Pro-68 to Glu-77, | | |
| | | | | | | Glu-102 to Glu-107, | | |
| | | | | | | Glu-131 to Leu-146, | | |
| | | | | | | Ala-175 to Glu-183, | | |
| | | | | | | Phe-205 to Lys-216, | | |
| | | | | | | Val-263 to Thr-281, | | |
| | | | | | | Pro-304 to Ala-313. | | |
| | HCE3G69 | 494346 | 199 | 165-482 | 488 | Lys-50 to Leu-69. | | |
| 20 | HCE5F43 | 612796 | 30 | 113-931 | 319 | Asn-23 to Ser-32, | 10p13 | 601362 |
| | | | | | | Trp-61 to Ser-68, | | |
| | | | | | | Ala-130 to Ala-135, | | |
| | | | | | | Thr-141 to Gly-148, | | |
| | | | | | | Asn-176 to Gly-182, | | |
| | | | | | | Pro-197 to Glu-205, | | |
| | | | | | | His-211 to Glu-222, | | |
| | | | | | | Gln-242 to Ile-248, | | |
| | | | | | | Thr-265 to Leu-271. | | |
| 21 | HCEFB80 | 1143407 | 31 | 12-281 | 320 | Met-1 to Ala-8, | 22q13.33 | |
| | | | | | | Ser-51 to Leu-62, | | |
| | | | | | | Pro-70 to Lys-78. | | |
| | HCEFB80 | 1046853 | 200 | 5-274 | 489 | Met-1 to Ala-8. | | |
| 22 | HCEWE20 | 543370 | 32 | 166-321 | 321 | Ser-17 to Gln-22. | | |
| 23 | HCGMD59 | 636078 | 33 | 438-662 | 322 | | | |
| 24 | HCNDR47 | 1016919 | 34 | 21-401 | 323 | Pro-71 to His-92. | 1 | |
| | HCNDR47 | 863677 | 201 | 124-507 | 490 | Pro-71 to His-92. | | |
| | HCNDR47 | 874128 | 202 | 603-632 | 491 | Leu-1 to Thr-9. | | |
| 25 | HCNSM70 | 637547 | 35 | 107-751 | 324 | Met-1 to Ser-6. | 11q24 | 600359, 602574, 602574 |
| | HCNSM70 | 589445 | 203 | 161-436 | 492 | Met-1 to Ser-6. | | |
| 26 | HCUIM65 | 550208 | 36 | 557-700 | 325 | | | |
| 27 | HCWDS72 | 707833 | 37 | 19-318 | 326 | | | |
| 28 | HCWKC15 | 553621 | 38 | 37-159 | 327 | Lys-28 to Thr-34. | | |
| 29 | HDHEB60 | 499233 | 39 | 568-894 | 328 | Asp-48 to Ser-54. | 11p11.2 | 133701, 168500, 171650, 176930, 176930, |
| | | | | | | | | 600623, 600811, 600958 |
| 30 | HDPBA28 | 1062783 | 40 | 259-3084 | 329 | Gln-33 to Trp-49, | 5q14.3 | |
| | | | | | | Gly-161 to Gly-172, | | |
| | | | | | | Ile-207 to Arg-212, | | |
| | | | | | | Asn-414 to Val-419, | | |
| | | | | | | Val-423 to Gln-428, | | |
| | | | | | | Val-436 to Gly-441, | | |
| | | | | | | Lys-467 to Leu-478, | | |
| | | | | | | Phe-497 to Ser-508, | | |
| | | | | | | Met-550 to Gly-560, | | |
| | | | | | | Glu-688 to Thr-697, | | |
| | | | | | | Ile-711 to Gly-720, | | |
| | | | | | | Ala-747 to Gly-759, | | |
| | | | | | | Leu-785 to Phe-791, | | |
| | | | | | | Ser-795 to Gln-800, | | |
| | | | | | | Thr-808 to Lys-813, | | |
| | | | | | | Ser-821 to Phe-832, | | |
| | | | | | | Thr-879 to Glu-889, | | |
| | | | | | | Leu-898 to Gln-904, | | |
| | | | | | | Gln-934 to Met-941. | | |
| | HDPBA28 | 866429 | 204 | 69-2894 | 493 | Gln-33 to Trp-49, | | |
| | | | | | | Gly-161 to Gly-172, | | |
| | | | | | | Ile-207 to Arg-212, | | |
| | | | | | | Asn-414 to Val-419, | | |
| | | | | | | Val-423 to Gln-428, | | |
| | | | | | | Val-436 to Gly-441, | | |
| | | | | | | Lys-467 to Leu-478, | | |
| | | | | | | Phe-497 to Ser-508, | | |
| | | | | | | Met-550 to Gly-560, | | |
| | | | | | | Glu-688 to Thr-697, | | |
| | | | | | | Ile-711 to Gly-720, | | |
| | | | | | | Ala-747 to Gly-759, | | |
| | | | | | | Leu-785 to Phe-791, | | |
| | | | | | | Ser-795 to Gln-800. | | |
| 31 | HDPCL63 | 1019008 | 41 | 35-835 | 330 | Ile-4 to Glu-10, | | |
| | | | | | | Gly-58 to Asp-64. | | |
| | HDPCL63 | 847045 | 205 | 260-733 | 494 | Lys-72 to Cys-80, | | |
| | | | | | | Leu-90 to Pro-96, | | |
| | | | | | | Ala-110 to Thr-119, | | |
| | | | | | | Glu-121 to Gly-128, | | |
| | | | | | | Ser-140 to Lys-147. | | |
| | HDPCL63 | 897484 | 206 | 605-961 | 495 | Pro-8 to Gln-13, | | |
| | | | | | | Thr-38 to Pro-46, | | |
| | | | | | | Pro-100 to Met-108, | | |
| | | | | | | Pro-113 to Pro-118. | | |
| 32 | HDPCO25 | 460682 | 42 | 182-343 | 331 | Pro-22 to His-33, | | |
| | | | | | | Ser-42 to Trp-48. | | |
| 33 | HDPFP29 | 628254 | 43 | 293-451 | 332 | | | |
| 34 | HDPGT01 | 771583 | 44 | 8-271 | 333 | Cys-65 to Ser-71. | 16q22.1 | 103850, 114835, 116800, 140100, 140100, |
| | | | | | | | | 192090, 192090, 192090, 192090, 245900, |
| | | | | | | | | 245900, 276600, 600223 |
| 35 | HDPHI51 | 460679 | 45 | 245-367 | 334 | Gly-2 to Glu-7, | | |
| | | | | | | Arg-27 to Gly-34. | | |
| 36 | HDPJM30 | 879325 | 46 | 59-1633 | 335 | Arg-15 to Val-22. | 21q22.3 | 120220, 120240, 123580, 151385, 171860, |
| | | | | | | | | 190685, 236100, 236200, 240300, 267750, |
| | | | | | | | | 600065, 601072, 601145 |
| | HDPJM30 | 603517 | 207 | 259-438 | 496 | Pro-41 to Ala-55. | | |
| 37 | HDPMM88 | 972734 | 47 | 100-2913 | 336 | Met-1 to Ser-13, | | |
| | | | | | | Ser-45 to Phe-51, | | |
| | | | | | | Asn-103 to Lys-113, | | |
| | | | | | | Phe-135 to Gly-140, | | |
| | | | | | | Asp-165 to Pro-178, | | |
| | | | | | | Ser-224 to Ala-229, | | |
| | | | | | | Asn-283 to Arg-288, | | |
| | | | | | | Asp-347 to Tyr-352, | | |
| | | | | | | Thr-367 to Glu-372, | | |
| | | | | | | Gly-420 to Thr-425, | | |
| | | | | | | Glu-456 to Lys-462, | | |
| | | | | | | Phe-466 to Asn-474, | | |
| | | | | | | Glu-480 to Leu-485, | | |
| | | | | | | Asp-673 to Asp-681, | | |
| | | | | | | Gln-684 to Gly-689, | | |
| | | | | | | Leu-841 to Gly-874, | | |
| | | | | | | Gly-890 to Pro-900, | | |
| | | | | | | Ser-902 to Ser-911, | | |
| | | | | | | Leu-918 to Asp-924, | | |
| | | | | | | Ser-930 to Val-935. | | |
| | HDPMM88 | 906121 | 208 | 141-467 | 497 | Ser-28 to Phe-34, | | |
| | | | | | | Asn-86 to Tyr-93. | | |
| | HDPMM88 | 902299 | 209 | 44-181 | 498 | | | |
| | HDPMM88 | 885059 | 210 | 419-439 | 499 | | | |
| | HDPMM88 | 874074 | 211 | 111-146 | 500 | | | |
| | HDPMM88 | 854246 | 212 | 167-334 | 501 | | | |
| | HDPMM88 | 854245 | 213 | 28-186 | 502 | Ser-26 to Thr-31. | | |
| 38 | HDPOJ08 | 731863 | 48 | 159-527 | 337 | Lys-30 to Thr-35. | 3q25.33 | 222900 |
| 39 | HDPPN86 | 1037893 | 49 | 127-267 | 338 | | | |
| | HDPPN86 | 895711 | 214 | 117-257 | 503 | | | |
| 40 | HDPSB18 | 1043263 | 50 | 123-323 | 339 | Lys-23 to Lys-31, | 10 | |
| | | | | | | Ala-38 to Ser-43. | | |
| | HDPSB18 | 903816 | 215 | 116-307 | 504 | | | |
| | HDPSB18 | 905414 | 216 | 1525-1566 | 505 | | | |
| | HDPSB18 | 732097 | 217 | 345-665 | 506 | Lys-57 to Gly-64. | | |
| 41 | HDPSH53 | 1309174 | 51 | 158-430 | 340 | Met-1 to Trp-6, | | |
| | | | | | | Leu-22 to Thr-27, | | |
| | | | | | | Pro-44 to Thr-63. | | |
| | HDPSH53 | 1040056 | 218 | 153-536 | 507 | Met-1 to Trp-6, | | |
| | | | | | | Leu-22 to Thr-27, | | |
| | | | | | | Pro-44 to Gly-58, | | |
| | | | | | | Ala-61 to Glu-74, | | |
| | | | | | | Pro-99 to Gly-111, | | |
| | | | | | | Cys-121 to Ser-127. | | |
| | HDPSH53 | 882768 | 219 | 212-484 | 508 | Met-1 to Trp-6, | | |
| | | | | | | Leu-22 to Thr-27. | | |
| 42 | HDPSP01 | 1352280 | 52 | 184-2313 | 341 | Gln-75 to Cys-80, | | |
| | | | | | | Glu-97 to Lys-104, | | |
| | | | | | | Glu-114 to Ala-119, | | |
| | | | | | | Thr-177 to Gln-190, | | |
| | | | | | | Asn-230 to Trp-240, | | |
| | | | | | | Glu-269 to Arg-274, | | |
| | | | | | | Pro-279 to Ala-286, | | |
| | | | | | | Pro-323 to Cys-328, | | |
| | | | | | | Asn-362 to Leu-367, | | |
| | | | | | | Thr-390 to Arg-397, | | |
| | | | | | | Leu-490 to Arg-495, | | |
| | | | | | | Gln-556 to Leu-561, | | |
| | | | | | | Gln-657 to Val-674. | | |
| | HDPSP01 | 689129 | 220 | 227-1153 | 509 | Gln-75 to Cys-80. | | |
| 43 | HDPSP54 | 744440 | 53 | 2356-2499 | 342 | Pro-29 to Lys-37. | 1q21.2 | 104770, 107670, 110700, 145001, 146760, |
| | | | | | | | | 146790, 191315, 601412, 601652, 601863, |
| | | | | | | | | 602491 |
| | HDPSP54 | 502472 | 221 | 179-343 | 510 | | | |
| 44 | HDPUW68 | 812737 | 54 | 40-1440 | 343 | Gly-12 to Tyr-26, | | |
| | | | | | | Val-52 to Asp-59, | | |
| | | | | | | Gln-88 to Asp-93, | | |
| | | | | | | Arg-124 to Asn-129, | | |
| | | | | | | His-193 to Arg-198, | | |
| | | | | | | Gln-207 to Thr-213, | | |
| | | | | | | Gln-338 to Arg-346, | | |
| | | | | | | Ser-378 to Ala-384, | | |
| | | | | | | Ser-413 to Arg-420, | | |
| | | | | | | Ser-428 to Glu-434, | | |
| | | | | | | His-443 to Ser451, | | |
| | | | | | | Glu-454 to Ser-461. | | |
| 45 | HDPXY01 | 879048 | 55 | 23-319 | 344 | Pro-39 to Trp-44. | 17 | |
| | HDPXY01 | 904768 | 222 | 33-329 | 511 | Pro-39 to Trp-44. | | |
| | HDPXY01 | 895716 | 223 | 539-607 | 512 | | | |
| | HDPXY01 | 895715 | 224 | 1190-1267 | 513 | | | |
| 46 | HDTBD53 | 972757 | 56 | 288-1385 | 345 | Glu-91 to Arg-117, | 3p25.1 | 193300, 193300, 227646 |
| | | | | | | Lys-124 to Ser-136, | | |
| | | | | | | Tyr-191 to Glu-200, | | |
| | | | | | | Glu-265 to Lys-272. | | |
| | HDTBD53 | 906342 | 225 | 292-1389 | 514 | Glu-91 to Arg-117, | | |
| | | | | | | Lys-124 to Ser-136. | | |
| 47 | HDTBV77 | 785879 | 57 | 326-2149 | 346 | Lys-5 to Lys-10, | 10p15.1 | |
| | | | | | | Asn-33 to Lys-39, | | |
| | | | | | | Asp-48 to Lys-54, | | |
| | | | | | | Pro-62 to Asp-67, | | |
| | | | | | | Asn-116 to Arg-123, | | |
| | | | | | | His-157 to Ala-162, | | |
| | | | | | | Val-242 to Lys-249, | | |
| | | | | | | Val-251 to Asp-264. | | |
| 48 | HDTDQ23 | 1306984 | 58 | 132-302 | 347 | Arg-24 to Arg-31, | | |
| | | | | | | Ile-33 to Trp-41, | | |
| | | | | | | Met-43 to His-52. | | |
| | HDTDQ23 | 879009 | 226 | 148-471 | 515 | Arg-24 to Arg-31, | | |
| | | | | | | Ile-33 to Gly-41. | | |
| | HDTDQ23 | 751707 | 227 | 148-369 | 516 | Arg-24 to Arg-31. | | |
| 49 | HE2DE47 | 619852 | 59 | 808-2427 | 348 | Leu-9 to Tyr-15, | | |
| | | | | | | Asp-34 to Gln-46, | | |
| | | | | | | Pro-51 to Asp-57, | | |
| | | | | | | Gly-88 to Thr-104, | | |
| | | | | | | Thr-123 to Ser-128. | | |
| | HE2DE47 | 382025 | 228 | 515-757 | 517 | Leu-31 to Asn-38. | | |
| 50 | HE2NV57 | 740750 | 60 | 99-398 | 349 | Ala-84 to Gln-93. | | |
| 51 | HE2PH36 | 570903 | 61 | 28-228 | 350 | | | |
| 52 | HE8DS15 | 847060 | 62 | 91-309 | 351 | | 18 | |
| 53 | HE9HY07 | 420063 | 63 | 35-160 | 352 | Pro-35 to Phe-41. | | |
| 54 | HEOMQ63 | 603533 | 64 | 123-266 | 353 | | 20p12.1 | |
| 55 | HEPAB80 | 1307790 | 65 | 73-438 | 354 | Met-1 to Pro-6, | | |
| | | | | | | Glu-58 to Cys-63, | | |
| | | | | | | Glu-65 to Gly-72, | | |
| | | | | | | Thr-74 to Asn-88, | | |
| | | | | | | Tyr-104 to Trp-109. | | |
| | HEPAB80 | 570048 | 229 | 67-435 | 518 | Met-1 to Pro-6, | | |
| | | | | | | Glu-58 to Cys-63, | | |
| | | | | | | Glu-65 to Gly-72, | | |
| | | | | | | Thr-74 to Val-87. | | |
| 56 | HFABH95 | 566712 | 66 | 199-549 | 355 | | | |
| 57 | HFAEF57 | 534142 | 67 | 232-492 | 356 | Leu-69 to Leu-74. | | |
| 58 | HFCEB37 | 411345 | 68 | 487-519 | 357 | | | |
| 59 | HFFAD59 | 520369 | 69 | 44-181 | 358 | Lys-13 to Asn-19, | 4q32-q34 | 189800, 208400, 231675 |
| | | | | | | Asn-27 to Asn-35. | | |
| 60 | HFGAD82 | 513669 | 70 | 1019-1135 | 359 | | Xp22.2 | 300075, 300077, 301200, 302350, 302801, |
| | | | | | | | | 305435, 306000, 306000, 307800, 308800, |
| | | | | | | | | 309510, 311200, 312040, 312170, 312700, |
| | | | | | | | | 313400 |
| 61 | HFIUR10 | 532060 | 71 | 50-184 | 360 | Gln-31 to Pro-39. | | |
| 62 | HFTBM50 | 545012 | 72 | 158-262 | 361 | Ala-19 to Lys-34. | 4q12 | 103600, 103600, 103600, 104150, 104150, |
| | | | | | | | | 104500, 164920, 164920, 164920, 170650, |
| | | | | | | | | 600900 |
| 63 | HFTDZ36 | 545726 | 73 | 547-753 | 362 | | 16q24.3 | 155555, 155555, 227650, 253000, 602783 |
| 64 | HFXBL33 | 778070 | 74 | 152-640 | 363 | | | |
| 65 | HFXJX44 | 701988 | 75 | 98-241 | 364 | | | |
| 66 | HFXKT05 | 658690 | 76 | 204-443 | 365 | Leu-16 to Ser-23, | 1p34.1 | 120550, 120570, 120575, 121800, 130500, |
| | | | | | | Ser-38 to Pro-43, | | 133200, 138140, 171760, 171760, 178300, |
| | | | | | | Gly-53 to Leu-60. | | 255800 |
| 67 | HGBHI35 | 570262 | 77 | 87-965 | 366 | Pro-10 to Arg-15, | 1p32.2 | 120260, 138140, 178300 |
| | | | | | | Leu-96 to Ser-103, | | |
| | | | | | | Gly-172 to Pro-178, | | |
| | | | | | | Gln-213 to Asp-218, | | |
| | | | | | | Asn-268 to Leu-275, | | |
| | | | | | | Arg-282 to Phe-289. | | |
| 68 | HGLAF75 | 566838 | 78 | 231-596 | 367 | Ser-40 to Gly-45, | | |
| | | | | | | Leu-73 to Arg-80. | | |
| 69 | HHENV10 | 562772 | 79 | 143-295 | 368 | Asp-26 to Leu-36, | | |
| | | | | | | Leu-42 to Phe-50. | | |
| 70 | HHGCG53 | 340818 | 80 | 230-361 | 369 | | 8 | |
| 71 | HHGCM76 | 662329 | 81 | 270-536 | 370 | | 17 | |
| | HHGCM76 | 383547 | 230 | 270-302 | 519 | | | |
| 72 | HHPEN62 | 695134 | 82 | 183-1709 | 371 | Met-98 to Gln-107, | | |
| | | | | | | Gly-120 to Gly-126, | | |
| | | | | | | Pro-138 to Trp-145, | | |
| | | | | | | Leu-159 to Gly-169, | | |
| | | | | | | Val-211 to Arg-217, | | |
| | | | | | | Cys-256 to His-262, | | |
| | | | | | | Glu-320 to Val-327, | | |
| | | | | | | Phe-399 to Asn-406, | | |
| | | | | | | Asp-444 to Ser-450, | | |
| | | | | | | Asp-475 to Trp-488. | | |
| 73 | HJABB94 | 456466 | 83 | 74-307 | 372 | Ala-28 to His-41, | 13q14.12 | 180200, 180200, 180200, 180200, 600631 |
| | | | | | | Pro-43 to Gln-64. | | |
| 74 | HJACG30 | 895505 | 84 | 291-425 | 373 | Thr-26 to Asn-39. | 15, X | |
| | HJACG30 | 821341 | 231 | 50-439 | 520 | Pro-57 to Pro-64. | | |
| | HJACG30 | 774300 | 232 | 350-715 | 521 | Lys-1 to Gly-8. | | |
| 75 | HJBCY35 | 719729 | 85 | 232-1215 | 374 | Glu-35 to His-41, | 7p22.3 | |
| | | | | | | Ser-62 to Ala-67, | | |
| | | | | | | Pro-145 to Leu-155, | | |
| | | | | | | Glu-157 to Ser-163, | | |
| | | | | | | Arg-190 to Val-197, | | |
| | | | | | | Asp-208 to Pro-215, | | |
| | | | | | | Ser-247 to Pro-252. | | |
| 76 | HJPAD75 | 651337 | 86 | 60-335 | 375 | Pro-42 to Cys-50, | | |
| | | | | | | Leu-61 to Ala-66. | | |
| 77 | HKABZ65 | 862030 | 87 | 77-808 | 376 | Ser-25 to Ala-31, | | |
| | | | | | | Gln-146 to Ser-151, | | |
| | | | | | | His-231 to Asn-236. | | |
| | HKABZ65 | 665424 | 233 | 69-800 | 522 | Ser-25 to Ala-31, | | |
| | | | | | | Gln-146 to Ser-151, | | |
| | | | | | | His-231 to Asn-236. | | |
| 78 | HKACB56 | 554616 | 88 | 27-269 | 377 | Tyr-39 to Lys-58. | | |
| 79 | HKACD58 | 1352202 | 89 | 38-940 | 378 | Thr-42 to Pro-53, | | |
| | | | | | | Val-78 to Glu-86, | | |
| | | | | | | Glu-103 to Met-112, | | |
| | | | | | | Ala-124 to Gly-131, | | |
| | | | | | | Trp-158 to Glu-168, | | |
| | | | | | | Gln-189 to Phe-210, | | |
| | | | | | | Ala-221 to Gly-226, | | |
| | | | | | | Arg-274 to Asp-284, | | |
| | | | | | | Ala-294 to Gly-299. | | |
| | HKACD58 | 552465 | 234 | 35-499 | 523 | Thr-42 to Pro-53, | | |
| | | | | | | Val-78 to Glu-86, | | |
| | | | | | | Glu-103 to Met-112, | | |
| | | | | | | Ala-124 to Gly-131. | | |
| 80 | HKAEV06 | 1352263 | 90 | 501-1814 | 379 | Thr-6 to Trp-13, | | |
| | | | | | | Thr-75 to Gln-80, | | |
| | | | | | | Thr-112 to Tyr-117, | | |
| | | | | | | Leu-133 to Pro-138, | | |
| | | | | | | Ala-146 to Phe-153, | | |
| | | | | | | Gln-319 to Ser-325, | | |
| | | | | | | Val-354 to His-372, | | |
| | | | | | | Pro-391 to Gly-396, | | |
| | | | | | | Val-405 to Thr-412, | | |
| | | | | | | Ile-425 to Asp-437. | | |
| | HKAEV06 | 638238 | 235 | 197-370 | 524 | Thr-6 to Trp-13. | | |
| 81 | HKAFT66 | 946512 | 91 | 508-831 | 380 | Ser-51 to Thr-57. | | |
| | HKAFT66 | 889258 | 236 | 508-831 | 525 | Ser-51 to Thr-57. | | |
| | HKAFT66 | 904790 | 237 | 234-347 | 526 | Gln-23 to Asp-28. | | |
| 82 | HKB1E57 | 876571 | 92 | 178-879 | 381 | Ser-7 to Pro-14, | | |
| | | | | | | Arg-47 to Arg-52, | | |
| | | | | | | His-117 to Val-123, | | |
| | | | | | | Glu-142 to Thr-149, | | |
| | | | | | | Leu-162 to Ala-167, | | |
| | | | | | | Gly-172 to Asn-177, | | |
| | | | | | | Thr-226 to Ala-232. | | |
| | HKB1E57 | 654871 | 238 | 30-170 | 527 | Met-1 to Tyr-6, | | |
| | | | | | | Thr-38 to Ala-44. | | |
| 83 | HKFBC53 | 1352286 | 93 | 64-1473 | 382 | Arg-52 to Ala-58, | | |
| | | | | | | Thr-121 to Lys-126, | | |
| | | | | | | Gly-156 to Gln-164, | | |
| | | | | | | Gly-201 to Glu-215, | | |
| | | | | | | Thr-432 to Gly-450, | | |
| | | | | | | Glu-461 to Gly-466. | | |
| | HKFBC53 | 701893 | 239 | 41-1369 | 528 | Ala-28 to Ala-33, | | |
| | | | | | | Arg-38 to Leu-48, | | |
| | | | | | | Thr-120 to Lys-125, | | |
| | | | | | | Gly-155 to Gln-163, | | |
| | | | | | | Gly-200 to Glu-214. | | |
| | HKFBC53 | 513190 | 240 | 3-929 | 529 | Ala-1 to Gly-6, | | |
| | | | | | | Ala-10 to Tyr-18. | | |
| | HKFBC53 | 383426 | 241 | 3-731 | 530 | Ala-1 to Gly-6, | | |
| | | | | | | Ala-10 to Tyr-18. | | |
| 84 | HKGDL36 | 877489 | 94 | 53-835 | 383 | Pro-36 to Gly-42, | Xp11.23 | 300047, 300071, 300110, 300600, 301000, |
| | | | | | | Gly-54 to Arg-65, | | 301000, 301830, 309470, 309500, 309610, |
| | | | | | | Ala-85 to Ala-91, | | 309850, 311050, 312060 |
| | | | | | | Ala-95 to Gln-102, | | |
| | | | | | | Ala-115 to Pro-121, | | |
| | | | | | | Pro-166 to Asp-191, | | |
| | | | | | | Lys-243 to Ala-249. | | |
| | HKGDL36 | 704088 | 242 | 55-501 | 531 | Pro-36 to Gly-42, | | |
| | | | | | | Pro-64 to Ala-76, | | |
| | | | | | | Gly-83 to Ala-90, | | |
| | | | | | | Ser-100 to Cys-108, | | |
| | | | | | | Thr-126 to Ser-135. | | |
| 85 | HKISB57 | 625956 | 95 | 130-417 | 384 | Ala-23 to Arg-36, | 22q12.2 | 101000, 101000, 101000, 101000, 123620, |
| | | | | | | His-38 to Ala-46, | | 138981, 188826, 600850, 601669 |
| | | | | | | Pro-50 to Gly-56, | | |
| | | | | | | Arg-85 to Val-94. | | |
| 86 | HKMLM11 | 514788 | 96 | 82-474 | 385 | Ala-59 to Thr-68, | | |
| | | | | | | Glu-72 to Ser-108, | | |
| | | | | | | Glu-115 to Lys-126. | | |
| 87 | HKMMW74 | 581399 | 97 | 202-327 | 386 | | | |
| 88 | HLDON23 | 636083 | 98 | 368-709 | 387 | Arg-28 to Gln-36. | 15q23 | 118485, 151670, 231680, 272800, 272800, |
| | | | | | | | | 272800, 276700, 600374, 601780 |
| 89 | HLDQR62 | 753742 | 99 | 520-1005 | 388 | Arg-122 to Ser-139, | 5p15.2- | 123000, 602568 |
| | | | | | | Met-144 to Glu-149. | p14.1 | |
| 90 | HLDQU79 | 740755 | 100 | 99-1142 | 389 | Leu-68 to Lys-74, | 10q21-q22 | 126090, 129010, 142600, 154545, 250850, |
| | | | | | | Tyr-109 to Lys-115, | | 601386, 601493 |
| | | | | | | Gln-200 to Val-205, | | |
| | | | | | | Lys-207 to Lys-214, | | |
| | | | | | | Glu-237 to Ile-244, | | |
| | | | | | | Ala-271 to Thr-279, | | |
| | | | | | | Ser-317 to Ser-329, | | |
| | | | | | | Gln-342 to Gly-348. | | |
| 91 | HLHAL68 | 684216 | 101 | 30-164 | 390 | Leu-32 to His-38. | | |
| 92 | HLIBD68 | 778073 | 102 | 186-338 | 391 | Met-37 to Ser-43. | | |
| 93 | HLICQ90 | 791828 | 103 | 249-869 | 392 | Pro-55 to Gly-66, | | |
| | | | | | | Phe-92 to Leu-103. | | |
| 94 | HLTHR66 | 699812 | 104 | 5-232 | 393 | | | |
| 95 | HLTIP94 | 1087335 | 105 | 226-516 | 394 | Gly-4 to Glu-9, | 17 | |
| | | | | | | Asp-22 to Cys-28, | | |
| | | | | | | Glu-39 to Leu-44, | | |
| | | | | | | Phe-88 to Phe-94. | | |
| | HLTIP94 | 1035443 | 243 | 226-423 | 532 | Gly-4 to Glu-9. | | |
| | HLTIP94 | 1047690 | 244 | 3-899 | 533 | Gly-1 to Glu-8, | | |
| | | | | | | Gly-37 to Gly-61, | | |
| | | | | | | Gln-71 to Phe-81, | | |
| | | | | | | Asp-95 to Gly-103, | | |
| | | | | | | Leu-126 to Ile-131, | | |
| | | | | | | Val-166 to Glu-171. | | |
| 96 | HLWAA17 | 629552 | 106 | 436-996 | 395 | Lys-17 to Glu-27, | 1q21 | 104770, 107670, 110700, 135940, 145001, |
| | | | | | | Gln-40 to Gly-47. | | 146790, 152445, 152445, 159001, 174000, |
| | | | | | | | | 179755, 182860, 182860, 182860, 191315, |
| | | | | | | | | 230800, 230800, 266200, 600897, 601105, |
| | | | | | | | | 601412, 601652, 602491 |
| 97 | HLYAC95 | 778075 | 107 | 92-232 | 396 | | | |
| 98 | HMADK33 | 561941 | 108 | 161-619 | 397 | Gly-43 to Gly-55. | 16p13 | 138760, 186580, 249100, 266600, 600760, |
| | | | | | | | | 600760, 600761, 600761 |
| 99 | HMAMI15 | 1352406 | 109 | 4-1023 | 398 | Gly-33 to Lys-41, | | |
| | | | | | | Pro-52 to Lys-60, | | |
| | | | | | | Asn-81 to Ala-86, | | |
| | | | | | | Lys-156 to Met-164, | | |
| | | | | | | Gln-283 to Lys-292, | | |
| | | | | | | Glu-303 to Gly-308. | | |
| | HMAMI15 | 1049263 | 245 | 3-923 | 534 | Gly-33 to Lys-41, | | |
| | | | | | | Pro-52 to Lys-60, | | |
| | | | | | | Asn-81 to Ala-86. | | |
| 100 | HMCFY13 | 635301 | 110 | 175-369 | 399 | | | |
| 101 | HMDAB56 | 560676 | 111 | 273-407 | 400 | | | |
| 102 | HMEED18 | 560775 | 112 | 34-699 | 401 | Gln-85 to Lys-91, | | |
| | | | | | | Pro-106 to Ser-117, | | |
| | | | | | | Pro-124 to Ala-130, | | |
| | | | | | | Trp-154 to Trp-160. | | |
| 103 | HMEFT54 | 520307 | 113 | 332-451 | 402 | | | |
| 104 | HMEGF92 | 520304 | 114 | 92-280 | 403 | Ser-34 to Ser-39. | | |
| 105 | HMSDL37 | 973996 | 115 | 531-725 | 404 | Ser-31 to Lys-45, | 3, 3p | |
| | | | | | | Pro-47 to Pro-53, | | |
| | | | | | | Ser-58 to Arg-63. | | |
| | HMSDL37 | 895429 | 246 | 528-722 | 535 | Ser-31 to Lys-45, | | |
| | | | | | | Pro-47 to Pro-53, | | |
| | | | | | | Ser-58 to Arg-63. | | |
| | HMSDL37 | 904241 | 247 | 565-645 | 536 | | | |
| | HMSDL37 | 750927 | 248 | 2-151 | 537 | | | |
| 106 | HMSFI26 | 560229 | 116 | 120-308 | 405 | | | |
| 107 | HMVBS81 | 639203 | 117 | 34-453 | 406 | | 11q13 | 102200, 106100, 131100, 131100, 131100, |
| | | | | | | | | 133780, 147050, 153700, 161015, 164009, |
| | | | | | | | | 168461, 168461, 168461, 180721, 180840, |
| | | | | | | | | 191181, 193235, 209901, 232600, 259700, |
| | | | | | | | | 259770, 600045, 600319, 600528, 601884 |
| 108 | HMWDC28 | 460487 | 118 | 124-252 | 407 | | | |
| 109 | HMWFT65 | 562063 | 119 | 72-437 | 408 | | | |
| 110 | HNEEE24 | 553558 | 120 | 213-428 | 409 | | | |
| 111 | HNFFC43 | 753337 | 121 | 488-691 | 410 | Asp-21 to Ser-29. | 12q13.12 | 120140, 120140, 120140, 120140, 120140, |
| | | | | | | | | 120140, 120140, 126337, 600808, 601284, |
| | | | | | | | | 601769, 601769, 602116 |
| 112 | HNFIY77 | 634551 | 122 | 228-929 | 411 | Pro-47 to Met-53, | | |
| | | | | | | Ser-130 to Ser-138. | | |
| 113 | HNFJF07 | 577013 | 123 | 86-286 | 412 | Val-25 to Gly-33. | | |
| 114 | HNGFR31 | 553552 | 124 | 108-380 | 413 | | | |
| 115 | HNGIJ31 | 519120 | 125 | 135-245 | 414 | Pro-18 to Glu-25. | | |
| 116 | HNGJE50 | 561568 | 126 | 77-217 | 415 | | | |
| 117 | HNGND37 | 839224 | 127 | 388-636 | 416 | Asn-46 to Ser-54. | | |
| 118 | HNGOI12 | 1041375 | 128 | 27-200 | 417 | Met-1 to Gly-9. | 11 | |
| | HNGOI12 | 838184 | 249 | 27-200 | 538 | Met-1 to Gly-9. | | |
| | HNGOI12 | 839283 | 250 | 596-877 | 539 | | | |
| 119 | HNHEU93 | 634851 | 129 | 57-302 | 418 | | | |
| 120 | HNHFM14 | 664507 | 130 | 38-280 | 419 | Glu-67 to Ala-74. | 1 | |
| 121 | HNHNB29 | 895462 | 131 | 40-201 | 420 | Glu-17 to Lys-30, | | |
| | | | | | | Val-43 to Asn-53. | | |
| 122 | HNHOD46 | 843488 | 132 | 12-251 | 421 | | | |
| 123 | HNTBI26 | 1310821 | 133 | 28-990 | 422 | Pro-56 to Pro-63, | | |
| | | | | | | Met-92 to Thr-98, | | |
| | | | | | | Ser-112 to Pro-120, | | |
| | | | | | | Pro-162 to Glu-173, | | |
| | | | | | | Ala-200 to Ser-210, | | |
| | | | | | | Lys-311 to Asn-320. | | |
| | HNTBI26 | 796807 | 251 | 32-547 | 540 | Pro-56 to Pro-63, | | |
| | | | | | | Met-92 to Thr-98, | | |
| | | | | | | Ser-112 to Pro-120, | | |
| | | | | | | Pro-162 to Ser-169. | | |
| | HNTBI26 | 590738 | 252 | 16-411 | 541 | Pro-56 to Pro-63, | | |
| | | | | | | Met-92 to Thr-98, | | |
| | | | | | | Arg-107 to Pro-120. | | |
| 124 | HNTBL27 | 545534 | 134 | 100-447 | 423 | Arg-45 to Thr-52, | 3p21.31 | 116806, 168468, 182280, 212138, 600163 |
| | | | | | | Tyr-60 to Gly-66, | | |
| | | | | | | Ala-87 to Trp-92, | | |
| | | | | | | Leu-105 to Ser-115. | | |
| 125 | HNTCE26 | 1160395 | 135 | 111-1316 | 424 | Tyr-2 to Gly-15, | | |
| | | | | | | Trp-192 to Asp-199, | | |
| | | | | | | Lys-248 to Leu-253, | | |
| | | | | | | Arg-330 to Lys-336, | | |
| | | | | | | Gln-354 to Val-364, | | |
| | | | | | | Val-383 to Ser-392. | | |
| | HNTCE26 | 853373 | 253 | 57-422 | 542 | Arg-75 to Lys-81, | | |
| | | | | | | Gln-99 to Asp-109. | | |
| 126 | HNTNI01 | 1352285 | 136 | 307-534 | 425 | Lys-71 to Trp-76. | | |
| | HNTNI01 | 699848 | 254 | 306-455 | 543 | | | |
| 127 | HODDF13 | 684307 | 137 | 46-171 | 426 | Thr-28 to Ser-40. | | |
| 128 | HODDN92 | 422913 | 138 | 434-541 | 427 | | | |
| 129 | HOFMQ33 | 1184465 | 139 | 49-1503 | 428 | Leu-37 to Gly-44, | | |
| | | | | | | Thr-137 to Leu-144, | | |
| | | | | | | Ala-178 to Asn-184, | | |
| | | | | | | Asp-194 to Val-201, | | |
| | | | | | | Leu-252 to Glu-258, | | |
| | | | | | | Asp-280 to Tyr-293, | | |
| | | | | | | Asn-296 to Thr-301, | | |
| | | | | | | Asp-322 to Asp-348, | | |
| | | | | | | Asn-363 to Ser-368, | | |
| | | | | | | His-370 to Thr-378, | | |
| | | | | | | Asn-380 to Cys-386, | | |
| | | | | | | Glu-391 to Cys-399, | | |
| | | | | | | Leu-421 to Arg-426, | | |
| | | | | | | Glu-454 to Tyr-459. | | |
| | HOFMQ33 | 919896 | 255 | 48-1502 | 544 | Leu-37 to Gly-44, | | |
| | | | | | | Pro-46 to Gly-51, | | |
| | | | | | | Thr-137 to Leu-144, | | |
| | | | | | | Ala-178 to Asn-184, | | |
| | | | | | | Asp-194 to Val-201, | | |
| | | | | | | Leu-252 to Glu-258, | | |
| | | | | | | Asp-280 to Tyr-293, | | |
| | | | | | | Asn-296 to Thr-301, | | |
| | | | | | | Asp-322 to Asp-348, | | |
| | | | | | | Asn-363 to Ser-368, | | |
| | | | | | | His-370 to Thr-378, | | |
| | | | | | | Asn-380 to Cys-386, | | |
| | | | | | | Glu-391 to Cys-399, | | |
| | | | | | | Leu-421 to Arg-426, | | |
| | | | | | | Glu-454 to Tyr-459. | | |
| | HOFMQ33 | 906694 | 256 | 78-875 | 545 | Leu-37 to Gly-43. | | |
| | HOFMQ33 | 902639 | 257 | 724-741 | 546 | | | |
| | HOFMQ33 | 702186 | 258 | 123-374 | 547 | Met-2 to Ser-9. | | |
| 130 | HOFOC73 | 931871 | 140 | 18-407 | 429 | Pro-22 to Cys-30, | | |
| | | | | | | Gly-43 to Tyr-53, | | |
| | | | | | | Ser-55 to Trp-65, | | |
| | | | | | | Ala-76 to His-81, | | |
| | | | | | | Pro-101 to Gly-108, | | |
| | | | | | | Pro-121 to Gly-127. | | |
| | HOFOC73 | 907073 | 259 | 23-226 | 548 | Thr-47 to Pro-55. | | |
| | HOFOC73 | 907072 | 260 | 127-171 | 549 | Pro-1 to Val-7. | | |
| | HOFOC73 | 878863 | 261 | 142-162 | 550 | | | |
| 131 | HOQBJ82 | 1352356 | 141 | 361-852 | 430 | Ser-30 to Met-36, | | |
| | | | | | | Ile-38 to Pro-46, | | |
| | | | | | | Gln-78 to Gly-88, | | |
| | | | | | | Thr-98 to Pro-105, | | |
| | | | | | | Gly-110 to Ser-122, | | |
| | | | | | | Ser-136 to Trp-144. | | |
| | HOQBJ82 | 858338 | 262 | 102-584 | 551 | Ser-30 to Met-36, | | |
| | | | | | | Ile-38 to Pro-46, | | |
| | | | | | | Gln-78 to Gly-88, | | |
| | | | | | | Thr-98 to Pro-105, | | |
| | | | | | | Gly-110 to Ser-122. | | |
| | HOQBJ82 | 857453 | 263 | 55-1029 | 552 | | | |
| 132 | HOSBY40 | 589431 | 142 | 89-259 | 431 | | | |
| 133 | HOSDJ25 | 854234 | 143 | 1076-1195 | 432 | Gly-18 to Lys-23, | | |
| | | | | | | Pro-31 to Gly-38. | | |
| | HOSDJ25 | 566845 | 264 | 146-268 | 553 | Gly-18 to Lys-23, | | |
| | | | | | | Pro-31 to Gly-38. | | |
| 134 | HPEAD79 | 520202 | 144 | 51-176 | 433 | Lys-16 to Ser-21, | | |
| | | | | | | Gly-36 to Asp-41. | | |
| 135 | HPIBO15 | 1310868 | 145 | 128-763 | 434 | Asp-40 to Glu-50, | | |
| | | | | | | Ser-59 to Gly-69, | | |
| | | | | | | Leu-109 to Lys-117, | | |
| | | | | | | Tyr-130 to Leu-137, | | |
| | | | | | | Leu-140 to Glu-160, | | |
| | | | | | | Gly-202 to Tyr-208. | | |
| | HPIBO15 | 590741 | 265 | 127-648 | 554 | Asp-40 to Glu-50, | | |
| | | | | | | Ser-59 to Gly-69, | | |
| | | | | | | Ala-98 to His-105, | | |
| | | | | | | Arg-108 to Glu-114, | | |
| | | | | | | Pro-124 to Ser-138, | | |
| | | | | | | Ala-143 to Gly-154. | | |
| 136 | HPJBI33 | 685699 | 146 | 236-397 | 435 | Arg-30 to Gln-36. | | |
| 137 | HPJBK12 | 1011467 | 147 | 126-272 | 436 | | 4,8 | |
| | HPJBK12 | 525375 | 266 | 119-265 | 555 | | | |
| | HPJBK12 | 796925 | 267 | 969-1001 | 556 | | | |
| | HPJBK12 | 699587 | 268 | 509-523 | 557 | | | |
| 138 | HPMDK28 | 846357 | 148 | 64-669 | 437 | Ala-55 to Asn-60, | 1p36.33 | |
| | | | | | | Lys-65 to Met-71, | | |
| | | | | | | Leu-75 to Asn-86, | | |
| | | | | | | Asp-93 to Asp-110, | | |
| | | | | | | Leu-130 to Cys-138, | | |
| | | | | | | Gln-149 to Glu-154, | | |
| | | | | | | Thr-172 to Ile-179, | | |
| | | | | | | Glu-185 to Arg-192. | | |
| | HPMDK28 | 639118 | 269 | 58-663 | 558 | Ala-55 to Asn-60, | | |
| | | | | | | Lys-65 to Met-71, | | |
| | | | | | | Leu-75 to Asn-86, | | |
| | | | | | | Asp-93 to Asp-110, | | |
| | | | | | | Leu-130 to Cys-138, | | |
| | | | | | | Gln-149 to Glu-154, | | |
| | | | | | | Thr-172 to Ile-179, | | |
| | | | | | | Glu-185 to Arg-192. | | |
| 139 | HPRAL78 | 1352342 | 149 | 62-1321 | 438 | Pro-31 to Thr-48, | 3p25.2 | 193300, 193300, 227646 |
| | | | | | | Arg-62 to Gly-70, | | |
| | | | | | | Ala-74 to Glu-87, | | |
| | | | | | | Lys-123 to Asp-129, | | |
| | | | | | | Pro-162 to Gly-167, | | |
| | | | | | | Glu-170 to Gly-189, | | |
| | | | | | | Arg-220 to Asn-228, | | |
| | | | | | | Glu-248 to Ala-258, | | |
| | | | | | | Gly-285 to Gly-300, | | |
| | | | | | | Pro-315 to Gly-327, | | |
| | | | | | | Ser-406 to Arg-411. | | |
| | HPRAL78 | 844216 | 270 | 70-1245 | 559 | Pro-31 to Thr-48, | | |
| | | | | | | Arg-62 to Gly-70, | | |
| | | | | | | Ala-74 to Glu-87, | | |
| | | | | | | Lys-123 to Asp-129, | | |
| | | | | | | Pro-162 to Gly-167, | | |
| | | | | | | Glu-170 to Gly-189, | | |
| | | | | | | Arg-220 to Asn-228. | | |
| | HPRAL78 | 484735 | 271 | 148-339 | 560 | Ser-49 to Arg-54. | | |
| 140 | HRABA80 | 882176 | 150 | 144-452 | 439 | Ala-30 to Gly-36, | | |
| | | | | | | Asp-45 to Trp-50, | | |
| | | | | | | Lys-65 to Cys-71, | | |
| | | | | | | Pro-80 to Cys-87. | | |
| | HRABA80 | 588460 | 272 | 130-438 | 561 | Ala-30 to Gly-36, | | |
| | | | | | | Asp-45 to Trp-50, | | |
| | | | | | | Lys-65 to Cys-71, | | |
| | | | | | | Pro-80 to Cys-87. | | |
| 141 | HRACD15 | 871221 | 151 | 252-410 | 440 | | | |
| | HRACD15 | 706332 | 273 | 252-413 | 562 | | | |
| 142 | HRACJ35 | 877666 | 152 | 132-1550 | 441 | Arg-31 to Lys-37, | 8q22.2 | 148900, 216550 |
| | | | | | | Lys-58 to Glu-65, | | |
| | | | | | | Asp-157 to Gly-168, | | |
| | | | | | | Ile-219 to Gly-225, | | |
| | | | | | | Ala-260 to Ser-268, | | |
| | | | | | | Thr-276 to Glu-282. | | |
| | HRACJ35 | 730504 | 274 | 99-1517 | 563 | Arg-31 to Lys-37, | | |
| | | | | | | Lys-58 to Glu-65, | | |
| | | | | | | Asp-157 to Gly-168, | | |
| | | | | | | Ile-219 to Gly-225, | | |
| | | | | | | Ala-260 to Ser-268, | | |
| | | | | | | Thr-276 to Glu-282. | | |
| | HRACJ35 | 470546 | 275 | 1-534 | 564 | Ile-9 to Gly-15, | | |
| | | | | | | Ala-50 to Ser-58, | | |
| | | | | | | Thr-66 to Glu-72. | | |
| 143 | HRGBL78 | 910133 | 153 | 30-1109 | 442 | Thr-48 to Arg-56, | 1 | |
| | | | | | | Pro-122 to Glu-127, | | |
| | | | | | | Lys-135 to Cys-143, | | |
| | | | | | | Ala-180 to Gly-185, | | |
| | | | | | | Ala-230 to Tyr-238, | | |
| | | | | | | Thr-244 to Gln-255, | | |
| | | | | | | Pro-274 to Ser-279, | | |
| | | | | | | Thr-284 to Phe-306, | | |
| | | | | | | Leu-345 to Thr-354. | | |
| | HRGBL78 | 904040 | 276 | 30-626 | 565 | Thr-48 to Arg-56, | | |
| | | | | | | Pro-122 to Glu-127, | | |
| | | | | | | Ala-136 to Tyr-141. | | |
| | HRGBL78 | 904621 | 277 | 11-19 | 566 | | | |
| | HRGBL78 | 863802 | 278 | 1048-1146 | 567 | Pro-24 to Arg-32. | | |
| 144 | HROAJ39 | 1181699 | 154 | 10-1146 | 443 | Ile-4 to Tyr-10, | 18q21.32 | 174810, 601567, 602080 |
| | | | | | | Arg-119 to Pro-126, | | |
| | | | | | | Glu-152 to Gly-158, | | |
| | | | | | | Thr-209 to Phe-215. | | |
| | HROAJ39 | 1114849 | 279 | 31-879 | 568 | Arg-40 to Pro-47, | | |
| | | | | | | Glu-73 to Gly-79, | | |
| | | | | | | Thr-130 to Phe-136, | | |
| | | | | | | Lys-277 to Lys-283. | | |
| | HROAJ39 | 1027712 | 280 | 247-1104 | 569 | Arg-40 to Pro-47, | | |
| | | | | | | Glu-73 to Gly-79, | | |
| | | | | | | Thr-130 to Phe-136. | | |
| 145 | HROBD68 | 827306 | 155 | 122-268 | 444 | Thr-19 to Thr-25. | | |
| 146 | HSAWD74 | 460527 | 156 | 142-570 | 445 | Leu-51 to Gly-77, | 7 | |
| | | | | | | Ile-117 to Pro-125. | | |
| | HSAWD74 | 371416 | 281 | 122-256 | 570 | Thr-25 to Cys-30, | | |
| | | | | | | Pro-35 to Arg-42. | | |
| 147 | HSDEK49 | 1352253 | 157 | 60-1256 | 446 | Val-29 to Val-37, | Xq12-q13.3 | 300011, 300011, 300011, 300127, 305450, |
| | | | | | | Asp-71 to His-76, | | 309605, 313700, 313700, 313700, 313700, |
| | | | | | | Gln-78 to Gly-84, | | 313700, 314580 |
| | | | | | | Met-105 to His-110, | | |
| | | | | | | Trp-117 to Asn-123, | | |
| | | | | | | Lys-179 to Pro-187, | | |
| | | | | | | Gly-218 to Asp-224, | | |
| | | | | | | Leu-237 to Ala-243, | | |
| | | | | | | Thr-256 to Asp-268, | | |
| | | | | | | Ser-275 to Lys-280, | | |
| | | | | | | Arg-308 to Glu-314, | | |
| | | | | | | Glu-326 to Glu-332, | | |
| | | | | | | Cys-343 to Asp-359. | | |
| | HSDEK49 | 625998 | 282 | 126-1043 | 571 | Val-29 to Val-37, | | |
| | | | | | | Asp-71 to His-76, | | |
| | | | | | | Gln-78 to Gly-84, | | |
| | | | | | | Met-105 to His-110, | | |
| | | | | | | Trp-117 to Gly-122, | | |
| | | | | | | Gln-136 to Lys-141, | | |
| | | | | | | Leu-143 to Ala-149, | | |
| | | | | | | Thr-162 to Asp-174, | | |
| | | | | | | Ser-181 to Lys-186, | | |
| | | | | | | Arg-214 to Glu-220, | | |
| | | | | | | Glu-232 to Glu-238, | | |
| | | | | | | Cys-249 to Asp-265. | | |
| 148 | HSDFJ26 | 834619 | 158 | 99-767 | 447 | Ala-21 to Glu-31, | | |
| | | | | | | Thr-37 to Cys-43, | | |
| | | | | | | Asp-62 to Ser-79, | | |
| | | | | | | Lys-134 to Gly-146, | | |
| | | | | | | Leu-164 to Met-169, | | |
| | | | | | | Glu-171 to Lys-201. | | |
| | HSDFJ26 | 836071 | 283 | 99-317 | 572 | Ala-21 to Glu-31, | | |
| | | | | | | Thr-37 to Cys-43, | | |
| | | | | | | Pro-64 to Asp-69. | | |
| 149 | HSDSB09 | 1301498 | 159 | 16-423 | 448 | Glu-33 to Glu-56, | | |
| | | | | | | Thr-75 to Cys-81. | | |
| | HSDSB09 | 463645 | 284 | 22-387 | 573 | Glu-33 to Glu-56, | | |
| | | | | | | Thr-75 to Cys-81. | | |
| 150 | HSDSE75 | 545057 | 160 | 160-705 | 449 | Tyr-15 to Leu-59, | | |
| | | | | | | Ala-68 to Asp-85, | | |
| | | | | | | Pro-87 to Asn-96, | | |
| | | | | | | His-120 to Lys-129, | | |
| | | | | | | Ser-153 to Gln-170. | | |
| 151 | HSIDJ81 | 589447 | 161 | 8-184 | 450 | Glu-37 to Gly-45. | | |
| 152 | HSKDA27 | 1352409 | 162 | 786-3635 | 451 | Gly-31 to Arg-36, | | |
| | | | | | | Thr-55 to Glu-62, | | |
| | | | | | | Ser-64 to Ser-79, | | |
| | | | | | | Arg-87 to Asp-96, | | |
| | | | | | | Arg-103 to Ala-109, | | |
| | | | | | | Asp-120 to Arg-126, | | |
| | | | | | | Gly-294 to Gly-302, | | |
| | | | | | | Ser-305 to Ala-318, | | |
| | | | | | | Val-320 to Arg-327, | | |
| | | | | | | Pro-344 to Thr-351, | | |
| | | | | | | Thr-383 to Thr-399, | | |
| | | | | | | Leu-414 to Lys-435, | | |
| | | | | | | Thr-449 to Ala-457, | | |
| | | | | | | Gly-461 to Asn-479, | | |
| | | | | | | Gly-483 to Gln-498, | | |
| | | | | | | Ser-503 to Arg-514, | | |
| | | | | | | Lys-532 to Ala-559, | | |
| | | | | | | Leu-563 to Ser-611, | | |
| | | | | | | Lys-632 to Tyr-638, | | |
| | | | | | | Asn-667 to Lys-672, | | |
| | | | | | | Leu-701 to Met-707, | | |
| | | | | | | Ser-745 to Lys-755, | | |
| | | | | | | Lys-761 to Leu-768, | | |
| | | | | | | Pro-787 to Trp-792, | | |
| | | | | | | Lys-871 to Met-883, | | |
| | | | | | | Pro-914 to Tyr-923, | | |
| | | | | | | Ser-925 to Arg-939, | | |
| | | | | | | Glu-942 to Tyr-950. | | |
| | HSKDA27 | 1074734 | 285 | 127-1653 | 574 | Gly-31 to Arg-36, | | |
| | | | | | | Thr-55 to Glu-62, | | |
| | | | | | | Ser-64 to Ser-79, | | |
| | | | | | | Arg-87 to Asp-96, | | |
| | | | | | | Arg-103 to Ala-109, | | |
| | | | | | | Asp-120 to Arg-126, | | |
| | | | | | | Gly-294 to Gly-302, | | |
| | | | | | | Ser-305 to Ala-318, | | |
| | | | | | | Val-320 to Arg-327, | | |
| | | | | | | Pro-342 to Thr-351, | | |
| | | | | | | Thr-383 to Thr-399, | | |
| | | | | | | Leu-414 to Lys-435, | | |
| | | | | | | Thr-449 to Ala-457, | | |
| | | | | | | Gly-461 to Asn-479, | | |
| | | | | | | Gly-483 to Gln-498, | | |
| | | | | | | Asn-504 to Val-509. | | |
| | HSKDA27 | 872570 | 286 | 12-1673 | 575 | Gly-27 to Arg-32, | | |
| | | | | | | Thr-51 to Glu-58, | | |
| | | | | | | Ser-60 to Ser-75, | | |
| | | | | | | Arg-83 to Asp-92, | | |
| | | | | | | Arg-99 to Ala-105, | | |
| | | | | | | Asp-116 to Arg-122, | | |
| | | | | | | Gly-290 to Ala-314, | | |
| | | | | | | Val-316 to Arg-323, | | |
| | | | | | | Pro-338 to Arg-345, | | |
| | | | | | | Thr-358 to His-375, | | |
| | | | | | | Arg-403 to Ser-408, | | |
| | | | | | | Ser-420 to Ser-436, | | |
| | | | | | | Thr-447 to Ala-455, | | |
| | | | | | | Gly-459 to Asn-477, | | |
| | | | | | | Gly-481 to Gln-496, | | |
| | | | | | | Ser-501 to Arg-512, | | |
| | | | | | | Lys-530 to Lys-554. | | |
| 153 | HSKGN81 | 676075 | 163 | 353-1132 | 452 | Ile-60 to Asn-69, | 22q13.2 | 188826 |
| | | | | | | Leu-106 to Asp-112, | | |
| | | | | | | Glu-130 to Gly-136, | | |
| | | | | | | Phe-160 to Glu-167, | | |
| | | | | | | Pro-184 to Cys-190, | | |
| | | | | | | Glu-197 to Ser-202, | | |
| | | | | | | Arg-215 to Glu-221, | | |
| | | | | | | Thr-237 to Pro-242. | | |
| | HSKGN81 | 409905 | 287 | 537-608 | 576 | Thr-11 to Pro-22. | | |
| 154 | HSNAD72 | 467397 | 164 | 220-327 | 453 | | | |
| 155 | HSNMC45 | 1352201 | 165 | 225-389 | 454 | Glu-23 to Asn-31, | | |
| | | | | | | Thr-38 to Gly-48. | | |
| | HSNMC45 | 545060 | 288 | 232-309 | 577 | | | |
| 156 | HSQFP66 | 460537 | 166 | 96-332 | 455 | Ser-6 to Arg-15. | | |
| 157 | HSRFZ57 | 892171 | 167 | 82-207 | 456 | | | |
| 158 | HSUBW09 | 413246 | 168 | 153-323 | 457 | Asp-23 to Gly-29. | | |
| 159 | HSVBU91 | 596868 | 169 | 256-528 | 458 | Asp-26 to Asn-31, | 7q11.23 | 116860, 129900, 233700, 600079 |
| | | | | | | Ser-37 to His-49, | | |
| | | | | | | Ala-65 to Ser-73. | | |
| 160 | HTAEE28 | 1018291 | 170 | 319-1167 | 459 | Pro-255 to Leu-264. | | |
| | HTAEE28 | 882919 | 289 | 372-737 | 578 | | | |
| | HTAEE28 | 864120 | 290 | 124-771 | 579 | | | |
| 161 | HTECC05 | 1352365 | 171 | 13-546 | 460 | Gly-41 to Leu-46, | | |
| | | | | | | Asp-67 to Thr-75, | | |
| | | | | | | Ile-114 to Gly-122, | | |
| | | | | | | Pro-156 to Trp-161. | | |
| | HTECC05 | 877448 | 291 | 21-404 | 580 | Gly-41 to Leu-46, | | |
| | | | | | | Asp-67 to Thr-75, | | |
| | | | | | | Ile-114 to Pro-127. | | |
| | HTECC05 | 666743 | 292 | 27-518 | 581 | Gly-41 to Leu-46, | | |
| | | | | | | Asp-67 to Thr-75, | | |
| | | | | | | Ile-114 to Ala-123. | | |
| 162 | HTEEB42 | 206980 | 172 | 59-952 | 461 | Met-1 to His-7. | 21q21.2 | |
| 163 | HTEFU65 | 543396 | 173 | 231-371 | 462 | Gly-35 to Gly-40. | | |
| 164 | HTELP17 | 836072 | 174 | 164-298 | 463 | | 3p12-p11.1 | 164500, 176880, 232500, 600151, 600795 |
| 165 | HTELS08 | 847090 | 175 | 15-491 | 464 | Pro-98 to Gln-106. | | |
| 166 | HTLEP53 | 634852 | 176 | 73-378 | 465 | Ser-33 to Lys-43. | | |
| 167 | HTPCS72 | 854941 | 177 | 2365-2577 | 466 | | 1q23.1 | 107300, 131210, 136132, 145001, 173610, |
| | | | | | | | | 601652 |
| | HTPCS72 | 566683 | 293 | 530-745 | 582 | | | |
| 168 | HTPIH83 | 919916 | 178 | 118-810 | 467 | Ser-29 to Ser-34, | Xq22.3-23 | 300046, 300067, 300067, 300121, 300121, |
| | | | | | | Ser-186 to Asp-196, | | 301201, 301835, 311850 |
| | | | | | | Arg-206 to Ser-225. | | |
| | HTPIH83 | 895024 | 294 | 111-530 | 583 | Ser-29 to Ser-34. | | |
| | HTPIH83 | 898088 | 295 | 96-353 | 584 | | | |
| 169 | HTSEW17 | 460579 | 179 | 170-283 | 468 | | | |
| 170 | HTTBI76 | 637725 | 180 | 133-534 | 469 | Glu-55 to Arg-61, | | |
| | | | | | | Gln-84 to Ser-92, | | |
| | | | | | | Ser-99 to Ser-104. | | |
| 171 | HTTBS64 | 1008159 | 181 | 95-223 | 470 | Leu-37 to Asn-42. | | |
| | HTTBS64 | 863187 | 296 | 100-228 | 585 | Leu-37 to Asn-42. | | |
| | HTTBS64 | 754125 | 297 | 175-402 | 586 | Lys-41 to Arg-46. | | |
| 172 | HTXJM03 | 603918 | 182 | 328-498 | 471 | Asp-51 to His-56. | | |
| 173 | HTXON32 | 838288 | 183 | 72-230 | 472 | Ala-45 to Gly-50. | | |
| 174 | HUFCJ30 | 638402 | 184 | 123-275 | 473 | Pro-31 to Ala-37. | | |
| 175 | HUVEB53 | 571200 | 185 | 14-151 | 474 | | 20p12 | 112261, 176640, 176640, 176640, 236700, |
| | | | | | | | | 601920 |
| 176 | HWAAD63 | 838626 | 186 | 322-825 | 475 | Pro-53 to Trp-61. | | |
| | HWAAD63 | 833089 | 298 | 322-483 | 587 | | | |
| | HWAAD63 | 793875 | 299 | 312-818 | 588 | | | |
| 177 | HWADJ89 | 799506 | 187 | 581-709 | 476 | | 1p36.31- | 120550, 120570, 120575, 130500, 133200, |
| | | | | | | | p36.11 | 600975 |
| 178 | HWBFX31 | 799427 | 188 | 271-426 | 477 | | | |

[0124] TABLE 1B.2

| | | | | Tissue Distribution Library Code: Count |
|---|---|---|---|---|
| Gene No: | cDNA Clone ID | Contig ID: | SEQ ID NO: X | (see Table 4 for Library Codes) |
| 1 | H2CBU83 | 884134 | 11 | AR182: 8, AR314: 7, AR271: 7, AR280: 6, AR315: 6, AR216: 6, AR052: 6, AR224: 6, AR225: 5, AR164: 5, AR215: 5, AR270: 5, |
| | | | | AR165: 5, AR162: 5, AR310: 5, AR245: 5, AR166: 5, AR161: 5, AR169: 5, AR223: 5, AR266: 5, AR172: 5, AR039: 5, AR192: 5, |
| | | | | AR163: 4, AR193: 4, AR207: 4, AR176: 4, AR269: 4, AR175: 4, AR226: 4, AR243: 4, AR217: 4, AR273: 4, AR168: 4, AR282: 4, |
| | | | | AR204: 4, AR291: 4, AR265: 4, AR183: 4, AR274: 4, AR299: 4, AR214: 4, AR205: 4, AR206: 4, AR194: 4, AR060: 4, AR272: 4, |
| | | | | AR238: 4, AR186: 4, AR222: 4, AR053: 4, AR197: 4, AR089: 3, AR257: 3, AR295: 3, AR289: 3, AR311: 3, AR221: 3, AR171: 3, |
| | | | | AR191: 3, AR250: 3, AR235: 3, AR252: 3, AR275: 3, AR309: 3, AR177: 3, AR180: 3, AR173: 3, AR178: 3, AR246: 3, AR312: 3, |
| | | | | AR188: 3, AR292: 3, AR298: 3, AR284: 3, AR212: 3, AR201: 3, AR285: 3, AR189: 3, AR296: 3, AR181: 3, AR300: 3, AR185: 3, |
| | | | | AR253: 3, AR202: 3, AR281: 3, AR237: 3, AR184: 3, AR268: 3, AR233: 3, AR286: 3, AR232: 3, AR308: 3, AR277: 3, AR267: 3, |
| | | | | AR228: 3, AR288: 3, AR316: 3, AR239: 3, AR195: 2, AR242: 2, AR263: 2, AR033: 2, AR287: 2, AR196: 2, AR210: 2, AR259: 2, |
| | | | | AR174: 2, AR294: 2, AR096: 2, AR234: 2, AR293: 2, AR290: 2, AR190: 2, AR255: 2, AR055: 2, AR213: 2, AR264: 2, AR231: 2, |
| | | | | AR313: 2, AR297: 2, AR258: 2, AR170: 2, AR218: 2, AR247: 2, AR061: 2, AR236: 2, AR219: 2, AR198: 2, AR230: 2, AR254: 2, |
| | | | | AR256: 2, AR261: 2, AR104: 2, AR240: 2, AR262: 2, AR283: 2, AR229: 2, AR227: 2, AR260: 2, AR200: 1, AR203: 1, AR179: 1, |
| | | | | AR244: 1, AR199: 1 S0414: 9, S0422: 7, L0662: 7, S0444: 6, L0748: 4, L0581: 4, S0442: 3, H0031: 3, L0666: 3, L0754: 3, H0656: 2, |
| | | | | S0358: 2, S0360: 2, H0013: 2, S0438: 2, S0440: 2, L0598: 2, L0803: 2, L0540: 2, L0756: 2, L0752: 2, L0758: 2, L0759: 2, S0242: 2, |
| | | | | H0624: 1, S0282: 1, H0742: 1, H0393: 1, H0586: 1, H0574: 1, H0036: 1, H0004: 1, T0103: 1, T0110: 1, H0571: 1, H0569: 1, |
| | | | | H0123: 1, L0471: 1, H0594: 1, S6028: 1, H0622: 1, UNKWN: 1, L0649: 1, L0381: 1, L0776: 1, L0659: 1, L0528: 1, L0792: 1, |
| | | | | L0793: 1, L0663: 1, L0664: 1, L0665: 1, L2257: 1, H0144: 1, S0374: 1, H0547: 1, H0593: 1, H0690: 1, H0670: 1, H0648: 1, H0672: 1, |
| | | | | H0651: 1, H0539: 1, S0378: 1, S0380: 1, H0521: 1, S0406: 1, H0555: 1, H0478: 1, L0744: 1, L0731: 1 and S0276: 1. |
| | H2CBU83 | 745366 | 189 | |
| 2 | H6EDC19 | 543259 | 12 | AR235: 21, AR197: 20, AR222: 17, AR261: 13, AR309: 11, AR195: 11, AR176: 9, AR201: 9, AR264: 9, AR295: 9, AR162: 9, |
| | | | | AR271: 9, AR242: 9, AR161: 9, AR163: 9, AR177: 9, AR165: 9, AR089: 9, AR236: 8, AR164: 8, AR283: 8, AR252: 8, AR196: 8, |
| | | | | AR166: 8, AR296: 8, AR229: 8, AR198: 8, AR263: 7, AR297: 7, AR181: 7, AR269: 7, AR287: 7, AR289: 7, AR288: 7, AR245: 7, |
| | | | | AR285: 7, AR253: 7, AR060: 7, AR204: 7, AR183: 7, AR266: 7, AR268: 6, AR240: 6, AR180: 6, AR312: 6, AR246: 6, AR192: 6, |
| | | | | AR199: 6, AR055: 6, AR316: 6, AR247: 6, AR272: 6, AR178: 6, AR193: 6, AR233: 6, AR299: 6, AR212: 6, AR228: 6, AR275: 5, |
| | | | | AR293: 5, AR096: 5, AR313: 5, AR291: 5, AR179: 5, AR238: 5, AR239: 5, AR053: 5, AR182: 5, AR286: 5, AR237: 5, AR231: 5, |
| | | | | AR308: 5, AR274: 5, AR250: 5, AR185: 5, AR226: 5, AR205: 5, AR270: 5, AR104: 5, AR255: 5, AR257: 5, AR218: 5, AR175: 5, |
| | | | | AR190: 4, AR061: 4, AR219: 4, AR191: 4, AR262: 4, AR203: 4, AR217: 4, AR213: 4, AR174: 4, AR267: 4, AR243: 4, AR039: 4, |
| | | | | AR230: 4, AR033: 4, AR188: 4, AR311: 4, AR232: 4, AR234: 4, AR254: 4, AR300: 4, AR189: 4, AR168: 4, AR214: 4, AR207: 3, |
| | | | | AR227: 3, AR277: 3, AR173: 3, AR294: 3, AR211: 3, AR258: 3, AR256: 3, AR170: 3, AR282: 3, AR171: 3, AR200: 3, AR225: 3, |
| | | | | AR223: 3, AR290: 3, AR260: 2, AR224: 2, AR216: 2, AR210: 2, AR172: 2, AR215: 1, AR169: 1 L0805: 4, H0559: 3, L0803: 3, |
| | | | | H0545: 2, L0664: 2, L0748: 2, L0777: 2, L0758: 2, L3643: 1, H0295: 1, H0657: 1, S0444: 1, H0734: 1, H0550: 1, S0222: 1, T0048: 1, |
| | | | | H0318: 1, H0052: 1, H0231: 1, H0041: 1, H0620: 1, H0606: 1, H0316: 1, H0077: 1, L0769: 1, L0761: 1, L0766: 1, L0774: 1, L0789: 1, |
| | | | | H0672: 1, H0539: 1, S0146: 1, L0751: 1, L0780: 1, L0731: 1, S0434: 1 and S0196: 1. |
| 3 | HACBD91 | 637482 | 13 | AR055: 116, AR283: 103, AR060: 91, AR089: 55, AR235: 53, AR299: 52, AR185: 51, AR104: 49, AR096: 34, AR039: 30, |
| | | | | AR282: 30, AR316: 29, AR261: 29, AR196: 24, AR218: 23, AR219: 21, AR272: 20, AR300: 20, AR313: 19, AR277: 19, AR240: 19, |
| | | | | AR309: 17, AR236: 17, AR295: 16, AR252: 15, AR271: 15, AR191: 15, AR285: 14, AR246: 13, AR165: 13, AR291: 13, AR264: 13, |
| | | | | AR311: 13, AR164: 13, AR166: 13, AR308: 12, AR275: 12, AR174: 12, AR287: 11, AR263: 11, AR286: 11, AR177: 11, AR161: 10, |
| | | | | AR162: 10, AR200: 10, AR201: 10, AR163: 10, AR195: 10, AR262: 10, AR188: 10, AR207: 10, AR288: 10, AR267: 10, AR197: 9, |
| | | | | AR181: 9, AR266: 9, AR312: 9, AR227: 9, AR257: 9, AR175: 9, AR289: 9, AR232: 9, AR189: 8, AR297: 8, AR053: 8, AR033: 8, |
| | | | | AR190: 8, AR245: 8, AR296: 8, AR193: 8, AR258: 8, AR255: 8, AR239: 7, AR260: 7, AR173: 7, AR198: 7, AR293: 7, AR199: 7, |
| | | | | AR250: 7, AR243: 6, AR247: 6, AR274: 6, AR211: 6, AR205: 6, AR203: 6, AR213: 6, AR178: 6, AR226: 5, AR256: 5, AR231: 5, |
| | | | | AR294: 5, AR270: 5, AR204: 5, AR176: 5, AR238: 5, AR210: 5, AR230: 4, AR237: 4, AR253: 4, AR170: 4, AR212: 4, AR061: 4, |
| | | | | AR183: 4, AR242: 4, AR254: 3, AR169: 3, AR182: 3, AR290: 3, AR268: 3, AR179: 3, AR217: 3, AR221: 2, AR216: 2, AR168: 2, |
| | | | | AR224: 2, AR229: 2, AR214: 2, AR223: 1, AR228: 1, AR172: 1, AR192: 1 L0748: 8, L0439: 4, L0749: 3, H0171: 2, L3659: 2, |
| | | | | L0438: 2, S6024: 1, S0360: 1, H0640: 1, S0278: 1, L3655: 1, S0280: 1, H0012: 1, L0055: 1, H0032: 1, H0647: 1, L0807: 1, L0665: 1, |
| | | | | H0659: 1, L0355: 1, S0328: 1, H0754: 1, H0710: 1, L0756: 1, L0780: 1, L0759: 1, S0260: 1, S0452: 1 and H0721: 1. |
| 4 | HAGAQ26 | 561996 | 14 | AR242: 9, AR192: 9, AR162: 8, AR161: 8, AR197: 8, AR163: 8, AR198: 7, AR204: 7, AR176: 7, AR201: 7, AR165: 7, AR089: 6, |
| | | | | AR164: 6, AR166: 6, AR252: 6, AR269: 6, AR180: 6, AR207: 6, AR182: 6, AR250: 6, AR271: 5, AR173: 5, AR243: 5, AR291: 5, |
| | | | | AR229: 5, AR212: 5, AR312: 5, AR295: 5, AR272: 5, AR288: 5, AR268: 5, AR313: 5, AR205: 5, AR178: 5, AR193: 5, AR053: 5, |
| | | | | AR264: 5, AR175: 5, AR239: 5, AR293: 5, AR060: 5, AR263: 5, AR246: 4, AR270: 4, AR235: 4, AR195: 4, AR181: 4, AR096: 4, |
| | | | | AR267: 4, AR238: 4, AR183: 4, AR218: 4, AR309: 4, AR213: 4, AR228: 4, AR289: 4, AR285: 4, AR104: 4, AR290: 4, AR311: 4, |
| | | | | AR231: 4, AR237: 4, AR174: 4, AR296: 4, AR266: 4, AR211: 4, AR316: 4, AR297: 4, AR177: 3, AR226: 3, AR230: 3, AR308: 3, |
| | | | | AR287: 3, AR233: 3, AR179: 3, AR219: 3, AR185: 3, AR286: 3, AR055: 3, AR294: 3, AR240: 3, AR247: 3, AR169: 3, AR253: 3, |
| | | | | AR224: 3, AR275: 3, AR215: 3, AR282: 3, AR274: 3, AR232: 3, AR227: 3, AR061: 3, AR039: 2, AR234: 2, AR168: 2, AR300: 2, |
| | | | | AR260: 2, AR256: 2, AR033: 2, AR236: 2, AR200: 2, AR189: 2, AR210: 2, AR258: 2, AR283: 2, AR214: 2, AR277: 2, AR299: 2, |
| | | | | AR199: 2, AR190: 2, AR261: 1, AR172: 1, AR262: 1, AR257: 1, AR191: 1, AR216: 1 L0603: 4, H0031: 3, S0010: 2, T0010: 2, |
| | | | | H0644: 2, L0438: 2, H0038: 1, H0616: 1, H0264: 1, S0426: 1, H0539: 1, L0439: 1 and S0260: 1. |
| 5 | HAGDS35 | 1352199 | 15 | AR089: 13, AR299: 12, AR060: 11, AR096: 8, AR055: 7, AR039: 7, AR185: 7, AR283: 6, AR313: 6, AR316: 5, AR309: 5, |
| | | | | AR282: 4, AR263: 4, AR240: 4, AR250: 4, AR218: 4, AR300: 4, AR161: 4, AR162: 4, AR104: 4, AR196: 4, AR163: 4, AR274: 3, |
| | | | | AR297: 3, AR277: 3, AR296: 3, AR308: 3, AR293: 3, AR175: 3, AR287: 3, AR221: 3, AR257: 3, AR291: 3, AR165: 3, AR262: 3, |
| | | | | AR285: 3, AR193: 3, AR166: 3, AR197: 3, AR169: 3, AR203: 3, AR254: 3, AR200: 3, AR164: 2, AR053: 2, AR294: 2, AR243: 2, |
| | | | | AR198: 2, AR295: 2, AR229: 2, AR176: 2, AR174: 2, AR188: 2, AR269: 2, AR312: 2, AR231: 2, AR182: 2, AR033: 2, AR219: 2, |
| | | | | AR255: 2, AR225: 2, AR311: 2, AR268: 2, AR201: 2, AR189: 2, AR288: 2, AR272: 2, AR226: 2, AR183: 2, AR181: 2, AR191: 2, |
| | | | | AR261: 2, AR258: 2, AR212: 2, AR190: 2, AR224: 2, AR179: 1, AR210: 1, AR239: 1, AR178: 1, AR204: 1, AR195: 1, AR275: 1, |
| | | | | AR177: 1, AR264: 1, AR234: 1, AR247: 1, AR267: 1, AR168: 1, AR233: 1, AR290: 1, AR286: 1, AR228: 1, AR217: 1 L0748: 8, |
| | | | | L0777: 5, H0013: 3, S0356: 2, H0622: 2, L0794: 2, L0803: 2, L0665: 2, L0438: 2, H0436: 2, L0743: 2, L0740: 2, H0170: 1, S0354: 1, |
| | | | | S0376: 1, H0749: 1, H0586: 1, S0010: 1, S6028: 1, H0188: 1, H0616: 1, S0422: 1, L0764: 1, L0521: 1, L0804: 1, L0774: 1, L0776: 1, |
| | | | | L0655: 1, L0659: 1, L5623: 1, H0520: 1, H0435: 1, L0439: 1, L0754: 1, L0747: 1, L0779: 1, L0758: 1, L0759: 1, S0026: 1, H0543: 1 |
| | | | | and H0423: 1. |
| | HAGDS35 | 543617 | 190 | |
| 6 | HAJAN23 | 1352364 | 16 | AR192: 7, AR169: 6, AR207: 6, AR170: 6, AR168: 5, AR214: 5, AR161: 5, AR162: 5, AR165: 5, AR172: 5, AR163: 5, AR223: 5, |
| | | | | AR311: 5, AR195: 5, AR164: 5, AR166: 5, AR196: 5, AR224: 4, AR222: 4, AR171: 4, AR217: 4, AR264: 4, AR308: 4, AR216: 4, |
| | | | | AR277: 4, AR282: 4, AR271: 4, AR291: 4, AR213: 4, AR197: 4, AR193: 3, AR235: 3, AR309: 3, AR212: 3, AR205: 3, AR283: 3, |
| | | | | AR250: 3, AR253: 3, AR261: 3, AR225: 3, AR188: 3, AR089: 3, AR245: 3, AR316: 3, AR312: 3, AR299: 3, AR215: 3, AR177: 3, |
| | | | | AR055: 3, AR247: 3, AR268: 2, AR295: 2, AR288: 2, AR221: 2, AR313: 2, AR199: 2, AR262: 2, AR033: 2, AR230: 2, AR285: 2, |
| | | | | AR039: 2, AR297: 2, AR229: 2, AR198: 2, AR300: 2, AR257: 2, AR286: 2, AR287: 2, AR104: 2, AR274: 2, AR060: 2, AR173: 2, |
| | | | | AR246: 2, AR272: 2, AR096: 2, AR227: 2, AR232: 2, AR237: 2, AR176: 2, AR182: 2, AR226: 2, AR185: 2, AR238: 2, AR266: 2, |
| | | | | AR181: 2, AR240: 2, AR231: 2, AR211: 2, AR258: 2, AR289: 2, AR191: 2, AR239: 2, AR175: 1, AR189: 1, AR270: 1, AR219: 1, |
| | | | | AR234: 1, AR061: 1, AR183: 1, AR200: 1, AR263: 1, AR203: 1, AR228: 1, AR236: 1, AR296: 1, AR201: 1, AR210: 1 S0408: 2, |
| | | | | H0619: 2, S0438: 2, L0803: 2, L0804: 2, L3643: 1, H0686: 1, H0650: 1, H0730: 1, T0110: 1, H0233: 1, S0003: 1, H0674: 1, H0623: 1, |
| | | | | H0561: 1, H0509: 1, S0422: 1, L0770: 1, L0766: 1, L0518: 1, L5622: 1, S0374: 1, H0593: 1, H0555: 1, L0748: 1 and L0755: 1. |
| | HAJAN23 | 872551 | 191 | |
| 7 | HAJBR69 | 638516 | 17 | AR309: 4, AR242: 3, AR217: 3, AR235: 3, AR225: 3, AR170: 2, AR252: 2, AR263: 2, AR180: 2, AR171: 2, AR282: 2, AR221: 2, |
| | | | | AR197: 2, AR200: 2, AR196: 2, AR308: 2, AR277: 2, AR165: 1, AR164: 1, AR215: 1, AR192: 1, AR166: 1, AR268: 1, AR165: 1, |
| | | | | AR211: 1, AR207: 1, AR283: 1, AR216: 1, AR204: 1, AR311: 1, AR240: 1, AR182: 1 S0040: 4, T0010: 4, H0560: 4, L0794: 4, |
| | | | | S0420: 3, L0455: 3, L3905: 3, H0656: 2, S0212: 2, H0619: 2, H0497: 2, H0052: 2, H0012: 2, H0429: 2, L0766: 2, L5623: 2, L0439: 2, |
| | | | | H0665: 2, H0556: 1, H0717: 1, H0650: 1, S0418: 1, H0580: 1, H0728: 1, H0735: 1, H0734: 1, H0370: 1, H0392: 1, H0333: 1, |
| | | | | H0013: 1, H0635: 1, H0505: 1, H0581: 1, H0569: 1, H0050: 1, H0373: 1, S0250: 1, S0022: 1, H0553: 1, L0370: 1, H0561: 1, L2263: 1 |
| | | | | L2261: 1, H0520: 1, H0593: 1, S0126: 1, H0435: 1, H0518: 1, H0521: 1, H0626: 1, L0748: 1, S0436: 1, L0591: 1, H0542: 1, S0424: 1 and |
| | | | | H0677: 1. |
| 8 | HAMFE15 | 905695 | 18 | AR235: 3, AR275: 3, AR221: 3, AR282: 2, AR207: 2, AR291: 2, AR180: 2, AR286: 2, AR173: 2, AR178: 2, AR225: 2, AR243: 2, |
| | | | | AR272: 1, AR176: 1, AR181: 1, AR163: 1, AR161: 1, AR285: 1, AR168: 1, AR257: 1, AR277: 1, AR261: 1, AR191: 1, AR311: 1, |
| | | | | AR196: 1, AR216: 1, AR296: 1, AR297: 1, AR269: 1, AR169: 1, AR266: 1, AR247: 1, AR199: 1, AR175: 1 L0748: 10, L0754: 9, |
| | | | | L0731: 9, L0766: 8, L0439: 7, L0803: 6, H0624: 5, L0759: 5, S0356: 4, H0486: 4, H0090: 4, L0789: 4, L0438: 4, L0740: 4, L0749: 4, |
| | | | | L0756: 4, L0777: 4, L0599: 4, S0360: 3, H0013: 3, S0003: 3, L0369: 3, L0794: 3, L0659: 3, L0809: 3, L0665: 3, H0539: 3, L0362: 3, |
| | | | | S0114: 2, S0358: 2, S0278: 2, H0441: 2, H0586: 2, H0333: 2, H0581: 2, H0328: 2, H0553: 2, H0529: 2, L0770: 2, L0662: 2, L0804: 2, |
| | | | | L0666: 2, L0663: 2, H0547: 2, H0519: 2, H0659: 2, H0670: 2, S0330: 2, L0747: 2, L0750: 2, L0755: 2, L0758: 2, L0589: 2, L0592: 2, |
| | | | | L0581: 2, L0593: 2, S0276: 2, S0424: 2, H0170: 1, H0171: 1, S0040: 1, S0116: 1, H0664: 1, H0458: 1, H0638: 1, H0192: 1, S0418: 1, |
| | | | | S0354: 1, S0410: 1, H0580: 1, S0046: 1, H0393: 1, L0717: 1, H0411: 1, S6022: 1, S0222: 1, H0587: 1, T0114: 1, L0021: 1, H0318: 1, |
| | | | | H0421: 1, H0052: 1, H0251: 1, H0544: 1, H0572: 1, H0566: 1, L0471: 1, H0057: 1, H0051: 1, H0510: 1, S6028: 1, H0271: 1, |
| | | | | S0334: 1, H0622: 1, S0368: 1, H0031: 1, L0142: 1, H0032: 1, H0124: 1, H0316: 1, H0591: 1, H0616: 1, L0060: 1, H0551: 1, H0264: 1, |
| | | | | H0412: 1, H0413: 1, L0564: 1, H0560: 1, S0150: 1, H0646: 1, S0144: 1, H0538: 1, L0598: 1, L0638: 1, L0372: 1, L0764: 1, L0771: 1, |
| | | | | L0521: 1, L0650: 1, L0805: 1, L0655: 1, L0656: 1, L0664: 1, H0144: 1, S0374: 1, H0691: 1, H0520: 1, H0689: 1, H0658: 1, H0672: 1, |
| | | | | S0152: 1, S0332: 1, H0521: 1, H0134: 1, H0631: 1, S0206: 1, L0751: 1, L0779: 1, L0753: 1, H0445: 1, S0394: 1, L0608: 1, S0026: 1, H0653: 1, |
| | | | | H0665: 1, S0242: 1, S0194: 1, H0542: 1, H0423: 1 and H0422: 1. |
| | HAMFE15 | 823350 | 192 | |
| 9 | HAMGR28 | 892971 | 19 | AR271: 8, AR184: 7, AR060: 7, AR240: 6, AR089: 6, AR219: 5, AR104: 5, AR183: 5, AR282: 5, AR052: 5, AR275: 5, AR266: 5, |
| | | | | AR316: 5, AR274: 5, AR249: 5, AR192: 4, AR053: 4, AR267: 4, AR096: 4, AR247: 4, AR277: 4, AR309: 4, AR312: 4, AR283: 4, |
| | | | | AR248: 4, AR253: 4, AR186: 4, AR182: 4, AR185: 4, AR238: 4, AR299: 4, AR310: 3, AR289: 3, AR285: 3, AR313: 3, AR213: 3, |
| | | | | AR218: 3, AR291: 3, AR241: 3, AR039: 3, AR251: 3, AR286: 3, AR033: 3, AR256: 3, AR061: 3, AR292: 3, AR234: 3, AR258: 3, |
| | | | | AR202: 3, AR231: 3, AR268: 3, AR295: 3, AR294: 3, AR293: 3, AR300: 3, AR055: 3, AR243: 3, AR315: 3, AR198: 2, AR296: 2, |
| | | | | AR270: 2, AR284: 2, AR259: 2, AR298: 2, AR290: 2, AR226: 2, AR237: 2, AR233: 2, AR273: 2, AR269: 2, AR229: 2, AR206: 2, |
| | | | | AR232: 2, AR227: 1, AR314: 1, AR179: 1, AR175: 1 L0666: 11, H0046: 9, H0556: 5, L0809: 5, L0747: 4, L0770: 3, L0769: 3, |
| | | | | L0783: 3, H0520: 3, L0439: 3, L0731: 3, H0664: 2, S0045: 2, H0123: 2, H0424: 2, L0637: 2, L0775: 2, S0328: 2, S0146: 2, L0777: 2, |
| | | | | L0601: 2, H0542: 2, L0411: 1, H0265: 1, H0740: 1, H0294: 1, H0583: 1, H0650: 1, H0662: 1, S0420: 1, S0444: 1, H0637: 1, H0735: 1, |
| | | | | S0476: 1, S0278: 1, H0370: 1, H0586: 1, H0587: 1, H0497: 1, H0486: 1, H0013: 1, H0069: 1, H0575: 1, H0253: 1, H0581: 1, |
| | | | | H0251: 1, H0150: 1, T0010: 1, H0083: 1, H0239: 1, H0594: 1, H0288: 1, H0290: 1, H0604: 1, H0553: 1, H0040: 1, H0087: 1, |
| | | | | H0494: 1, H0560: 1, L0065: 1, S0438: 1, S0440: 1, H0641: 1, H0633: 1, H0646: 1, L3815: 1, S0422: 1, S0002: 1, H0529: 1, L0763: 1, |
| | | | | L0646: 1, L0800: 1, L0764: 1, L0767: 1, L0649: 1, L0803: 1, L0806: 1, L0653: 1, L0659: 1, L0518: 1, L0789: 1, L0791: 1, S0053: 1, |
| | | | | H0144: 1, H0701: 1, H0725: 1, S0148: 1, L0438: 1, H0519: 1, H0593: 1, S0406: 1, L0748: 1, L0745: 1, L0749: 1, L0750: 1, L0779: 1, |
| | | | | L0752: 1, L0758: 1, S0031: 1, S0436: 1, S0460: 1 and L0600: 1. |
| | HAMGR28 | 748223 | 193 | |
| 10 | HAPOM49 | 769555 | 20 | AR089: 5, AR169: 5, AR060: 5, AR282: 4, AR283: 4, AR055: 3, AR218: 3, AR096: 3, AR171: 3, AR104: 3, AR277: 3, AR313: 3, |
| | | | | AR217: 3, AR039: 2, AR240: 2, AR316: 2, AR221: 2, AR163: 2, AR180: 2, AR183: 2, AR170: 2, AR172: 2, AR165: 2, AR299: 2, |
| | | | | AR166: 2, AR242: 2, AR195: 2, AR168: 2, AR300: 2, AR275: 2, AR162: 2, AR164: 1, AR216: 1, AR193: 1, AR205: 1, AR264: 1, |
| | | | | AR185: 1, AR173: 1, AR266: 1, AR161: 1, AR272: 1, AR214: 1, AR257: 1, AR196: 1, AR270: 1, AR268: 1, AR289: 1, AR245: 1, |
| | | | | AR312: 1, AR223: 1, AR212: 1, AR261: 1, AR219: 1, AR297: 1, AR192: 1 S0406: 5, L0750: 5, L0777: 4, L0749: 3, L0779: 3, |
| | | | | H0662: 2, S0440: 2, L0770: 2, L0794: 2, L0776: 2, L0657: 2, L0783: 2, L0740: 2, L0747: 2, L0780: 2, S0420: 1, S0442: 1, S0444: 1, |
| | | | | S0045: 1, L3316: 1, H0599: 1, H0575: 1, S0474: 1, T0115: 1, H0083: 1, H0510: 1, H0644: 1, H0551: 1, S0386: 1, H0494: 1, H0561: 1, |
| | | | | H0538: 1, S0422: 1, L0646: 1, L0804: 1, L0774: 1, L0809: 1, L0530: 1, L0663: 1, L0664: 1, L0665: 1, H0593: 1, S0380: 1, S0027: 1, |
| | | | | L0748: 1, L0439: 1, L0756: 1, L0755: 1, L0758: 1, L0485: 1, H0542: 1 and H0423: 1. |
| | HAPOM49 | 722386 | 194 | |
| 11 | HATBR65 | 635514 | 21 | AR313: 46, AR173: 29, AR258: 29, AR096: 29, AR229: 29, AR300: 26, AR218: 26, AR240: 26, AR247: 26, AR214: 26, AR196: 24, |
| | | | | AR223: 23, AR175: 23, AR257: 22, AR174: 22, AR178: 22, AR165: 21, AR217: 21, AR162: 21, AR183: 21, AR161: 21, AR089: 21, |
| | | | | AR293: 20, AR163: 20, AR264: 20, AR164: 20, AR033: 20, AR309: 20, AR216: 19, AR181: 19, AR262: 19, AR166: 19, AR185: 19, |
| | | | | AR299: 19, AR180: 18, AR312: 18, AR179: 18, AR238: 18, AR290: 18, AR297: 18, AR189: 18, AR188: 18, AR269: 17, AR270: 17, |
| | | | | AR199: 17, AR294: 17, AR261: 16, AR224: 16, AR191: 16, AR316: 16, AR285: 16, AR225: 16, AR203: 16, AR235: 15, AR182: 15, |
| | | | | AR263: 15, AR219: 15, AR177: 15, AR212: 15, AR274: 14, AR236: 14, AR226: 14, AR234: 14, AR053: 14, AR231: 14, AR287: 14, |
| | | | | AR233: 14, AR296: 14, AR275: 14, AR176: 14, AR193: 14, AR171: 13, AR286: 13, AR282: 13, AR267: 13, AR255: 13, AR210: 13, |
| | | | | AR268: 13, AR308: 13, AR190: 13, AR060: 13, AR291: 13, AR222: 13, AR260: 13, AR200: 12, AR104: 12, AR211: 12, AR237: 12, |
| | | | | AR295: 11, AR266: 11, AR252: 11, AR213: 11, AR168: 11, AR288: 11, AR254: 11, AR215: 11, AR228: 11, AR221: 10, AR272: 10, |
| | | | | AR230: 10, AR250: 10, AR204: 10, AR039: 10, AR242: 10, AR239: 9, AR245: 9, AR289: 9, AR195: 9, AR256: 9, AR170: 9, |
| | | | | AR169: 9, AR172: 9, AR283: 9, AR246: 8, AR205: 8, AR227: 8, AR198: 8, AR277: 8, AR271: 8, AR311: 8, AR192: 8, AR197: 8, |
| | | | | AR243: 7, AR253: 7, AR201: 7, AR232: 6, AR207: 6, AR061: 5, AR055: 5 L0534: 4, L0562: 3, L0527: 3, H0254: 2, S0045: 2, |
| | | | | H0156: 2, L0589: 2, H0255: 1, H0402: 1, L0539: 1, T0060: 1, H0328: 1, H0615: 1, H0598: 1, H0264: 1, L0766: 1, L0493: 1, L0666: 1, |
| | | | | S0052: 1, H0539: 1, L0747: 1, L0752: 1 and L0366: 1. |
| 12 | HAUAI83 | 639009 | 22 | H0294: 2 |
| | HAUAI83 | 383592 | 195 | |
| 13 | HBAMB15 | 671835 | 23 | AR245: 4, AR213: 3, AR176: 3, AR224: 3, AR252: 3, AR168: 3, AR165: 2, AR164: 2, AR183: 2, AR197: 2, AR204: 2, AR238: 2, |
| | | | | AR266: 2, AR282: 2, AR162: 2, AR171: 2, AR271: 2, AR289: 2, AR270: 2, AR291: 2, AR205: 2, AR274: 2, AR096: 2, AR268: 2, |
| | | | | AR297: 2, AR296: 2, AR225: 2, AR161: 1, AR311: 1, AR192: 1, AR269: 1, AR261: 1, AR179: 1, AR182: 1, AR234: 1, AR191: 1, |
| | | | | AR277: 1, AR181: 1, AR237: 1, AR313: 1, AR300: 1, AR089: 1 H0410: 1, H0530: 1, H0328: 1, L0455: 1 and L0740: 1. |
| 14 | HBGBA69 | 1352289 | 24 | AR196: 22, AR089: 21, AR275: 21, AR188: 20, AR240: 19, AR096: 19, AR177: 18, AR060: 18, AR104: 18, AR282: 18, AR269: 17, |
| | | | | AR238: 17, AR195: 17, AR176: 17, AR189: 16, AR199: 15, AR283: 15, AR185: 15, AR183: 15, AR244: 15, AR218: 15, AR219: 15, |
| | | | | AR186: 14, AR299: 14, AR248: 14, AR247: 14, AR211: 14, AR197: 14, AR173: 14, AR254: 14, AR174: 14, AR268: 14, AR310: 13, |
| | | | | AR290: 13, AR203: 13, AR052: 13, AR289: 13, AR033: 13, AR191: 13, AR316: 13, AR165: 13, AR300: 13, AR055: 13, AR164: 12, |
| | | | | AR266: 12, AR243: 12, AR249: 12, AR271: 12, AR190: 12, AR166: 12, AR273: 12, AR270: 12, AR241: 12, AR178: 12, AR253: 12, |
| | | | | AR061: 12, AR175: 12, AR232: 12, AR246: 11, AR181: 11, AR267: 11, AR313: 11, AR261: 11, AR274: 11, AR239: 11, AR198: 11, |
| | | | | AR182: 11, AR250: 11, AR309: 10, AR280: 10, AR200: 10, AR234: 10, AR229: 10, AR180: 10, AR291: 10, AR184: 10, AR255: 10, |
| | | | | AR272: 10, AR235: 10, AR245: 10, AR192: 9, AR161: 9, AR296: 9, AR039: 9, AR221: 9, AR231: 9, AR163: 9, AR251: 9, |
| | | | | AR201: 9, AR257: 9, AR236: 9, AR204: 9, AR162: 9, AR233: 9, AR216: 8, AR210: 8, AR215: 8, AR295: 8, AR315: 8, AR314: 8, |
| | | | | AR265: 8, AR284: 8, AR228: 8, AR312: 8, AR277: 8, AR286: 8, AR213: 8, AR194: 8, AR288: 8, AR226: 8, AR298: 8, AR242: 8, |
| | | | | AR256: 7, AR227: 7, AR193: 7, AR217: 7, AR262: 7, AR053: 7, AR264: 7, AR179: 7, AR224: 7, AR237: 6, AR202: 6, AR293: 6, |
| | | | | AR230: 6, AR214: 6, AR297: 6, AR287: 6, AR205: 6, AR292: 6, AR285: 6, AR258: 6, AR263: 6, AR294: 6, AR225: 6, AR281: 6, |
| | | | | AR212: 5, AR170: 5, AR206: 5, AR308: 5, AR172: 5, AR222: 5, AR259: 5, AR169: 4, AR260: 4, AR171: 4, AR252: 4, AR207: 3, |
| | | | | AR311: 3, AR168: 2, AR223: 2 S0474: 13, L0747: 7, S0410: 6, H0617: 5, L0777: 5, H0618: 4, H0521: 4, H0661: 3, H0663: 3, |
| | | | | S0360: 3, H0052: 3, H0545: 3, H0038: 3, L0766: 3, S0380: 3, L0740: 3, L0751: 3, L0757: 3, H0653: 3, S0358: 2, H0733: 2, L0717: 2, |
| | | | | S0278: 2, H0318: 2, H0309: 2, H0327: 2, H0150: 2, H0687: 2, H0181: 2, H0413: 2, H0509: 2, L0769: 2, L0764: 2, L0771: 2, L0662: 2, |
| | | | | L0768: 2, L0774: 2, L0776: 2, L5622: 2, L0666: 2, L0663: 2, L2261: 2, S0126: 2, H0658: 2, S0406: 2, L0744: 2, L0758: 2, L0588: 2, |
| | | | | L3643: 1, S0342: 1, H0713: 1, H0740: 1, T0049: 1, H0657: 1, S0116: 1, S0282: 1, H0255: 1, H0402: 1, H0638: 1, S0418: 1, S0420: 1, |
| | | | | S0442: 1, S0444: 1, S0408: 1, H0730: 1, H0741: 1, H0735: 1, H0776: 1, S0300: 1, L3388: 1, H0370: 1, H0592: 1, H0643: 1, L0623: 1, |
| | | | | H0156: 1, L0021: 1, H0253: 1, H0263: 1, L0738: 1, H0530: 1, H0571: 1, H0081: 1, H0578: 1, H0083: 1, H0266: 1, H0039: 1, |
| | | | | H0604: 1, H0031: 1, H0616: 1, H0087: 1, T0004: 1, H0494: 1, S0438: 1, S0142: 1, H0743: 1, H0529: 1, L0763: 1, L0796: 1, L0761: 1, |
| | | | | L0645: 1, L0773: 1, L0561: 1, L0650: 1, L0651: 1, L0653: 1, L0655: 1, L0661: 1, L0629: 1, L0657: 1, L0658: 1, L4669: 1, |
| | | | | L2258: 1, H0725: 1, H0519: 1, H0670: 1, H0672: 1, H0518: 1, S0044: 1, H0555: 1, H0436: 1, S3014: 1, L0439: 1, L0749: 1, L0731: 1, |
| | | | | L0759: 1, S0260: 1, H0445: 1, S0434: 1, S0196: 1, H0423: 1 and H0506: 1. |
| | HBGBA69 | 709658 | 196 | |
| 15 | HBIAE26 | 514418 | 25 | AR161: 11, AR162: 11, AR163: 11, AR313: 9, AR242: 8, AR165: 8, AR039: 7, AR164: 7, AR166: 7, AR207: 6, AR201: 6, |
| | | | | AR204: 6, AR089: 6, AR096: 6, AR197: 6, AR309: 6, AR053: 5, AR193: 5, AR264: 5, AR299: 5, AR060: 5, AR182: 5, AR173: 5, |
| | | | | AR185: 5, AR198: 5, AR236: 5, AR300: 5, AR181: 5, AR228: 5, AR271: 5, AR176: 5, AR277: 5, AR055: 5, AR262: 5, AR196: 5, |
| | | | | AR247: 5, AR250: 4, AR258: 4, AR312: 4, AR257: 4, AR175: 4, AR229: 4, AR178: 4, AR179: 4, AR316: 4, AR293: 4, AR269: 4, |
| | | | | AR274: 4, AR240: 4, AR261: 4, AR246: 4, AR104: 4, AR266: 4, AR177: 4, AR191: 4, AR233: 4, AR275: 4, AR192: 4, AR268: 4, |
| | | | | AR183: 4, AR213: 4, AR205: 4, AR231: 4, AR297: 4, AR288: 4, AR174: 3, AR212: 3, AR294: 3, AR270: 3, AR267: 3, AR238: 3, |
| | | | | AR180: 3, AR215: 3, AR255: 3, AR245: 3, AR199: 3, AR287: 3, AR226: 3, AR296: 3, AR234: 3, AR203: 3, AR218: 3, AR285: 3, |
| | | | | AR282: 3, AR311: 3, AR195: 3, AR200: 3, AR239: 3, AR283: 3, AR263: 3, AR217: 3, AR222: 3, AR272: 3, AR291: 3, AR237: 3, |
| | | | | AR033: 3, AR290: 3, AR188: 3, AR243: 3, AR253: 3, AR189: 3, AR225: 3, AR295: 3, AR230: 3, AR170: 3, AR061: 2, AR219: 2, |
| | | | | AR286: 2, AR308: 2, AR227: 2, AR256: 2, AR232: 2, AR216: 2, AR190: 2, AR171: 2, AR289: 2, AR211: 2, AR223: 2, AR235: 1, |
| | | | | AR214: 1 S0049: 1 and S0146: 1. |
| 16 | HBINS58 | 1352386 | 26 | AR222: 31, AR214: 31, AR169: 26, AR223: 23, AR235: 22, AR224: 22, AR283: 21, AR195: 20, AR170: 20, AR168: 20, AR264: 20, |
| | | | | AR263: 19, AR212: 19, AR207: 18, AR282: 18, AR161: 18, AR315: 18, AR311: 18, AR172: 17, AR089: 17, AR162: 16, AR216: 16, |
| | | | | AR217: 16, AR316: 16, AR261: 16, AR281: 16, AR171: 16, AR163: 16, AR277: 16, AR236: 14, AR104: 14, AR309: 14, AR213: 13, |
| | | | | AR308: 13, AR096: 13, AR314: 13, AR240: 13, AR055: 12, AR310: 12, AR299: 12, AR194: 12, AR265: 12, AR053: 12, AR313: 12, |
| | | | | AR242: 12, AR272: 12, AR288: 12, AR225: 11, AR205: 11, AR202: 11, AR295: 11, AR280: 11, AR198: 11, AR245: 11, AR165: 11, |
| | | | | AR039: 11, AR166: 11, AR060: 11, AR193: 10, AR297: 10, AR271: 10, AR164: 10, AR252: 10, AR232: 10, AR192: 10, AR284: 10, |
| | | | | AR300: 10, AR177: 10, AR218: 10, AR285: 10, AR312: 9, AR033: 9, AR197: 9, AR246: 9, AR289: 9, AR196: 9, AR201: 9, |
| | | | | AR206: 9, AR174: 9, AR219: 9, AR296: 9, AR221: 9, AR254: 9, AR262: 9, AR181: 8, AR204: 8, AR291: 8, AR275: 8, AR185: 8, |
| | | | | AR243: 8, AR274: 8, AR286: 8, AR247: 8, AR241: 8, AR238: 8, AR266: 8, AR287: 7, AR229: 7, AR292: 7, AR230: 7, AR268: 7, |
| | | | | AR251: 7, AR211: 7, AR239: 7, AR178: 7, AR270: 7, AR231: 7, AR226: 7, AR227: 7, AR183: 7, AR184: 7, AR215: 6, AR293: 6, |
| | | | | AR234: 6, AR269: 6, AR253: 6, AR199: 6, AR176: 6, AR210: 6, AR180: 6, AR200: 6, AR298: 6, AR188: 6, AR250: 6, AR257: 6, |
| | | | | AR233: 5, AR294: 5, AR175: 5, AR203: 5, AR267: 5, AR249: 5, AR191: 5, AR189: 5, AR248: 5, AR182: 5, AR290: 5, AR273: 5, |
| | | | | AR173: 5, AR228: 5, AR259: 5, AR258: 5, AR255: 5, AR237: 5, AR052: 5, AR190: 5, AR061: 4, AR179: 4, AR256: 4, AR186: 3, |
| | | | | AR260: 3, AR244: 3 H0593: 2, H0617: 1, L0657: 1 and L0592: 1. |
| | HBINS58 | 961712 | 197 | |
| | HBINS58 | 892924 | 198 | |
| 17 | HBNAW17 | 526797 | 27 | AR266: 6, AR245: 3, AR168: 2, AR246: 2, AR217: 2, AR177: 2, AR291: 2, AR264: 2, AR274: 1, AR165: 1, AR267: 1, AR312: 1, |
| | | | | AR216: 1, AR311: 1, AR164: 1, AR261: 1, AR182: 1, AR299: 1, AR257: 1, AR166: 1, AR243: 1, AR309: 1, AR089: 1, AR224: 1, |
| | | | | AR175: 1 L0766: 3 and H0188: 1. |
| 18 | HCE2F54 | 634016 | 28 | AR253: 23, AR250: 22, AR271: 21, AR197: 20, AR195: 19, AR199: 18, AR252: 16, AR272: 13, AR254: 12, AR198: 12, AR269: 12, |
| | | | | AR211: 12, AR205: 11, AR180: 11, AR176: 11, AR210: 11, AR200: 11, AR240: 10, AR161: 10, AR266: 10, AR162: 10, AR229: 10, |
| | | | | AR177: 10, AR163: 10, AR242: 10, AR243: 10, AR212: 10, AR309: 10, AR246: 10, AR268: 9, AR181: 9, AR245: 9, AR165: 9, |
| | | | | AR183: 9, AR275: 9, AR238: 9, AR291: 9, AR178: 9, AR264: 9, AR164: 9, AR196: 9, AR204: 9, AR188: 8, AR166: 8, AR182: 8, |
| | | | | AR191: 8, AR255: 8, AR175: 8, AR289: 8, AR179: 8, AR290: 8, AR237: 8, AR189: 8, AR225: 8, AR235: 8, AR193: 8, AR247: 8, |
| | | | | AR270: 8, AR234: 7, AR219: 7, AR201: 7, AR263: 7, AR207: 7, AR228: 7, AR267: 7, AR312: 7, AR190: 7, AR308: 7, AR173: 7, |
| | | | | AR296: 7, AR274: 7, AR257: 7, AR297: 7, AR311: 7, AR231: 7, AR213: 7, AR293: 7, AR313: 7, AR287: 6, AR033: 6, AR262: 6, |
| | | | | AR300: 6, AR224: 6, AR218: 6, AR288: 6, AR192: 6, AR295: 6, AR294: 6, AR203: 6, AR285: 6, AR239: 6, AR089: 6, AR282: 6, |
| | | | | AR174: 6, AR185: 5, AR233: 5, AR236: 5, AR316: 5, AR096: 5, AR230: 5, AR286: 5, AR217: 5, AR222: 5, AR261: 5, AR053: 5, |
| | | | | AR061: 5, AR221: 5, AR214: 5, AR168: 4, AR223: 4, AR172: 4, AR226: 4, AR169: 4, AR258: 4, AR039: 4, AR299: 4, AR283: 4, |
| | | | | AR216: 4, AR232: 4, AR060: 4, AR227: 4, AR277: 3, AR104: 3, AR256: 3, AR055: 3, AR260: 3, AR171: 2, AR170: 2, AR215: 1 |
| | | | | H0052: 9, L0794: 6, L0758: 6, L0659: 5, L0666: 4, L0438: 4, S0126: 4, L0754: 4, L0779: 4, H0617: 3, L0748: 3, L0751: 3, L0759: 3, |
| | | | | H0333: 2, H0013: 2, H0150: 2, H0494: 2, L0761: 2, L0641: 2, L0649: 2, L0809: 2, L0519: 2, L0663: 2, S0380: 2, L3832: 2, L0439: 2, |
| | | | | L0747: 2, L0749: 2, H0685: 1, H0713: 1, H0295: 1, H0341: 1, H0484: 1, H0255: 1, H0638: 1, S0358: 1, S0046: 1, S0476: 1, H0393: 1, |
| | | | | L3388: 1, H0261: 1, S0222: 1, H0592: 1, H0069: 1, H0253: 1, H0596: 1, H0009: 1, H0178: 1, H0081: 1, H0051: 1, H0266: 1, |
| | | | | H0428: 1, H0100: 1, S0112: 1, L0639: 1, L5575: 1, L3905: 1, L0662: 1, L0766: 1, L0804: 1, L0651: 1, L0655: 1, L0787: 1, L0664: 1, |
| | | | | L0665: 1, T0068: 1, H0672: 1, H0539: 1, L0602: 1, S0406: 1, H0436: 1, H0478: 1, L0777: 1, L0755: 1, H0422: 1 and H0506: 1. |
| 19 | HCE3G69 | 728432 | 29 | AR033: 18, AR197: 14, AR195: 13, AR196: 11, AR271: 10, AR242: 10, AR243: 9, AR165: 9, AR201: 9, AR207: 9, AR164: 9, |
| | | | | AR182: 9, AR166: 9, AR269: 8, AR198: 8, AR235: 8, AR161: 8, AR162: 8, AR183: 8, AR272: 8, AR268: 8, AR296: 8, AR163: 8, |
| | | | | AR176: 8, AR193: 8, AR238: 7, AR254: 7, AR200: 7, AR247: 7, AR181: 7, AR291: 7, AR225: 7, AR309: 6, AR178: 6, AR270: 6, |
| | | | | AR188: 6, AR173: 6, AR266: 6, AR228: 6, AR282: 6, AR246: 6, AR169: 6, AR213: 6, AR212: 6, AR192: 6, AR177: 6, AR261: 6, |
| | | | | AR250: 6, AR175: 6, AR204: 6, AR239: 6, AR233: 6, AR234: 6, AR255: 6, AR288: 5, AR171: 5, AR267: 5, AR217: 5, AR290: 5, |
| | | | | AR168: 5, AR223: 5, AR236: 5, AR089: 5, AR289: 5, AR191: 5, AR203: 5, AR224: 5, AR245: 5, AR061: 5, AR104: 5, AR308: 5, |
| | | | | AR229: 5, AR205: 5, AR060: 5, AR039: 5, AR231: 5, AR240: 5, AR053: 5, AR274: 5, AR287: 5, AR222: 5, AR216: 5, AR316: 5, |
| | | | | AR214: 5, AR215: 5, AR264: 5, AR199: 5, AR174: 5, AR221: 5, AR297: 5, AR312: 4, AR180: 4, AR313: 4, AR295: 4, AR179: 4, |
| | | | | AR170: 4, AR263: 4, AR293: 4, AR253: 4, AR299: 4, AR232: 4, AR257: 4, AR189: 4, AR300: 4, AR294: 4, AR311: 4, AR237: 4, |
| | | | | AR285: 4, AR210: 4, AR275: 4, AR172: 4, AR190: 4, AR226: 4, AR211: 4, AR230: 4, AR185: 3, AR286: 3, AR227: 3, AR262: 3, |
| | | | | AR055: 3, AR256: 3, AR277: 3, AR096: 3, AR258: 3, AR219: 2, AR283: 2, AR260: 2, AR218: 2, AR252: 1 L0439: 9, H0052: 7, |
| | | | | L0748: 7, S0440: 5, L0758: 5, H0046: 4, H0038: 4, L0769: 4, S0442: 3, H0013: 3, H0253: 3, T0010: 3, L0774: 3, L0776: 3, H0144: 3, |
| | | | | H0521: 3, S0404: 3, L0752: 3, L0731: 3, H0656: 2, S0358: 2, S0360: 2, S0222: 2, H0618: 2, H0620: 2, L0351: 2, S0422: 2, L0764: 2, |
| | | | | L0771: 2, L0783: 2, L0793: 2, H0658: 2, H0666: 2, L0751: 2, L0754: 2, L0745: 2, L0747: 2, L0750: 2, H0624: 1, H0265: 1, H0556: 1, |
| | | | | H0686: 1, S0134: 1, S0212: 1, S0001: 1, H0254: 1, H0661: 1, L0946: 1, S0354: 1, S0444: 1, S0408: 1, H0734: 1, L3081: 1, S0300: 1, |
| | | | | S0278: 1, H0369: 1, H0370: 1, H0333: 1, H0574: 1, H0486: 1, H0036: 1, H0263: 1, H0597: 1, H0545: 1, H0572: 1, H0024: 1, |
| | | | | S0388: 1, S0051: 1, S0250: 1, H0252: 1, H0428: 1, H0039: 1, H0644: 1, L0055: 1, H0674: 1, H0135: 1, H0087: 1, T0067: 1, H0488: 1, |
| | | | | L3154: 1, H0529: 1, L0763: 1, L0770: 1, L3905: 1, L0761: 1, L0374: 1, L0662: 1, L0768: 1, L0766: 1, L0803: 1, L0775: 1, L0805: 1, |
| | | | | L0653: 1, L0661: 1, L0526: 1, L5622: 1, L0666: 1, L0664: 1, L0665: 1, S0053: 1, L0710: 1, L2654: 1, H0547: 1, H0682: 1, H0435: 1, |
| | | | | H0670: 1, H0660: 1, H0648: 1, H0672: 1, S0328: 1, H0539: 1, S0152: 1, H0696: 1, S0044: 1, S0406: 1, H0631: 1, S3014: 1, S0028: 1, |
| | | | | L0742: 1, L0749: 1, L0753: 1, L0759: 1, S0436: 1, S0011: 1, S0192: 1, H0542: 1, H0423: 1, S0398: 1 and H0506: 1. |
| | HCE3G69 | 494346 | 199 | |
| 20 | HCE5F43 | 612796 | 30 | AR060: 280, AR055: 230, AR299: 151, AR089: 139, AR104: 127, AR283: 124, AR185: 112, AR039: 97, AR096: 88, AR316: 79, |
| | | | | AR282: 66, AR277: 62, AR300: 50, AR240: 46, AR218: 40, AR219: 35, AR313: 29, AR215: 8, AR169: 8, AR221: 8, AR217: 8, |
| | | | | AR214: 7, AR216: 7, AR225: 7, AR171: 6, AR222: 5, AR223: 5, AR246: 5, AR188: 5, AR263: 5, AR224: 5, AR245: 5, AR191: 5, |
| | | | | AR269: 5, AR168: 5, AR270: 5, AR205: 5, AR183: 5, AR176: 4, AR252: 4, AR166: 4, AR190: 4, AR175: 4, AR235: 4, AR165: 4, |
| | | | | AR178: 4, AR266: 4, AR164: 4, AR170: 4, AR180: 4, AR274: 4, AR179: 4, AR174: 4, AR196: 4, AR192: 4, AR163: 4, AR161: 4, |
| | | | | AR162: 4, AR275: 4, AR309: 4, AR193: 4, AR264: 4, AR257: 4, AR053: 4, AR181: 4, AR201: 4, AR189: 4, AR312: 3, AR271: 3, |
| | | | | AR311: 3, AR195: 3, AR173: 3, AR033: 3, AR177: 3, AR295: 3, AR268: 3, AR210: 3, AR291: 3, AR197: 3, AR288: 3, AR203: 3, |
| | | | | AR200: 3, AR182: 3, AR272: 3, AR290: 3, AR308: 3, AR285: 3, AR236: 3, AR198: 3, AR255: 3, AR243: 3, AR231: 3, AR250: 3, |
| | | | | AR294: 3, AR172: 2, AR287: 2, AR286: 2, AR238: 2, AR237: 2, AR226: 2, AR289: 2, AR254: 2, AR297: 2, AR296: 2, AR204: 2, |
| | | | | AR247: 2, AR260: 2, AR262: 2, AR293: 2, AR239: 2, AR261: 2, AR233: 2, AR229: 2, AR232: 2, AR267: 2, AR211: 2, AR234: 2, |
| | | | | AR212: 2, AR256: 1, AR258: 1 L0777: 10, L0756: 4, S0414: 3, L0659: 3, L0740: 3, H0441: 2, S0003: 2, H0616: 2, L0766: 2, |
| | | | | H0144: 2, L0439: 2, L0780: 2, L0759: 2, L0596: 2, S0242: 2, H0542: 2, S0470: 1, S0342: 1, H0341: 1, S0001: 1, S0282: 1, S0408: 1, |
| | | | | S0007: 1, T0060: 1, H0427: 1, H0098: 1, H0042: 1, H0581: 1, S0049: 1, H0052: 1, H0024: 1, H0051: 1, H0647: 1, S0422: 1, L0770: 1, |
| | | | | L0769: 1, L0772: 1, L0662: 1, L0794: 1, L0803: 1, L0805: 1, L0666: 1, L0663: 1, L0664: 1, S0374: 1, S0126: 1, H0648: 1, H0696: 1, |
| | | | | L0747: 1, L0752: 1, L0755: 1 and L0591: 1. |
| 21 | HCEFB80 | 1143407 | 31 | H0052: 6, L0439: 5, L0794: 3, L0748: 3, L0415: 2, H0661: 2, H0559: 2, S0049: 2, H0327: 2, S0051: 2, H0399: 2, S0036: 2, L0351: 2, |
| | | | | L0770: 2, H0144: 2, L0758: 2, L0759: 2, S0116: 1, S0110: 1, H0637: 1, H0261: 1, S0222: 1, H0438: 1, H0013: 1, H0569: 1, H0320: 1, |
| | | | | S0422: 1, H0529: 1, L0638: 1, L0517: 1, L0438: 1, S0126: 1, L0749: 1, L0756: 1 and L0592: 1. |
| | HCEFB80 | 1046853 | 200 | |
| 22 | HCEWE20 | 543370 | 32 | AR253: 8, AR053: 6, AR196: 6, AR198: 5, AR191: 5, AR313: 5, AR245: 4, AR181: 4, AR174: 4, AR195: 4, AR189: 3, AR096: 3, |
| | | | | AR089: 3, AR213: 3, AR177: 3, AR270: 3, AR254: 3, AR300: 3, AR190: 3, AR269: 3, AR224: 3, AR247: 3, AR188: 2, AR275: 2, |
| | | | | AR175: 2, AR226: 2, AR165: 2, AR171: 2, AR312: 2, AR179: 2, AR162: 2, AR180: 2, AR164: 2, AR299: 2, AR161: 2, AR163: 2, |
| | | | | AR257: 2, AR238: 2, AR166: 2, AR240: 2, AR185: 2, AR268: 2, AR207: 2, AR223: 2, AR199: 2, AR060: 2, AR178: 2, AR316: 2, |
| | | | | AR204: 2, AR173: 2, AR295: 2, AR200: 2, AR183: 2, AR212: 2, AR309: 2, AR233: 2, AR216: 2, AR229: 1, AR294: 1, AR237: 1, |
| | | | | AR290: 1, AR235: 1, AR239: 1, AR228: 1, AR288: 1, AR234: 1, AR201: 1, AR168: 1, AR289: 1, AR293: 1, AR286: 1, AR222: 1, |
| | | | | AR236: 1, AR258: 1, AR182: 1, AR033: 1, AR287: 1, AR283: 1, AR282: 1, AR266: 1, AR232: 1, AR262: 1, AR230: 1 H0052: 2, |
| | | | | H0261: 1, H0271: 1 and S0458: 1. |
| 23 | HCGMD59 | 636078 | 33 | AR214: 5, AR216: 4, AR215: 4, AR269: 4, AR217: 3, AR232: 3, AR193: 3, AR297: 3, AR286: 3, AR245: 3, AR176: 3, AR294: 3, |
| | | | | AR264: 3, AR197: 3, AR295: 3, AR200: 2, AR312: 2, AR096: 2, AR165: 2, AR104: 2, AR263: 2, AR183: 2, AR164: 2, AR243: 2, |
| | | | | AR168: 2, AR195: 2, AR238: 2, AR277: 2, AR283: 2, AR033: 1, AR171: 1, AR296: 1, AR060: 1, AR228: 1, AR172: 1, AR210: 1, |
| | | | | AR227: 1, AR224: 1, AR061: 1, AR289: 1, AR309: 1, AR237: 1, AR308: 1, AR293: 1 L0748: 6, L0750: 4, S0386: 3, L0439: 3, |
| | | | | L0777: 3, H0624: 2, H0052: 2, L0435: 2, L0598: 2, L0809: 2, L0751: 2, L0747: 2, L0756: 2, L0753: 2, L0731: 2, H0422: 2, L0718: 2, |
| | | | | H0265: 1, H0381: 1, H0459: 1, S0356: 1, S0360: 1, H0619: 1, H0393: 1, H0411: 1, H0050: 1, L0455: 1, H0412: 1, S0344: 1, L0769: 1, |
| | | | | L0638: 1, L0764: 1, L0771: 1, L0803: 1, L0804: 1, L0805: 1, L0776: 1, L0438: 1, H0689: 1, H0659: 1, H0658: 1, H0660: 1, H0666: 1, |
| | | | | L0594: 1 and S0106: 1. |
| 24 | HCNDR47 | 1016919 | 34 | AR282: 5, AR060: 5, AR309: 4, AR055: 4, AR266: 4, AR162: 4, AR213: 4, AR161: 4, AR163: 4, AR225: 4, AR254: 3, AR270: 3, |
| | | | | AR177: 3, AR207: 3, AR300: 3, AR176: 3, AR089: 3, AR192: 3, AR263: 2, AR221: 2, AR172: 2, AR198: 2, AR104: 2, AR224: 2, |
| | | | | AR283: 2, AR240: 2, AR277: 2, AR185: 2, AR165: 2, AR218: 2, AR164: 2, AR197: 2, AR166: 2, AR096: 2, AR299: 2, AR275: 2, |
| | | | | AR269: 2, AR236: 2, AR168: 2, AR316: 2, AR288: 2, AR313: 2, AR171: 2, AR217: 2, AR183: 2, AR308: 2, AR257: 2, AR039: 2, |
| | | | | AR296: 2, AR272: 2, AR264: 1, AR033: 1, AR261: 1, AR311: 1, AR246: 1, AR212: 1, AR286: 1, AR289: 1, AR255: 1, AR231: 1, |
| | | | | AR237: 1, AR061: 1, AR179: 1, AR238: 1, AR297: 1, AR245: 1, AR195: 1, AR215: 1 L0794: 3, L0764: 2, L0439: 2, H0052: 1, |
| | | | | H0597: 1, T0006: 1, L0766: 1, H0648: 1, S0330: 1 and L0753: 1. |
| | HCNDR47 | 863677 | 201 | |
| | HCNDR47 | 874128 | 202 | |
| 25 | HCNSM70 | 637547 | 35 | AR207: 46, AR223: 40, AR281: 39, AR194: 39, AR214: 36, AR169: 35, AR222: 34, AR206: 34, AR202: 33, AR264: 32, AR263: 30, |
| | | | | AR195: 30, AR315: 29, AR308: 29, AR235: 28, AR212: 28, AR172: 28, AR170: 27, AR224: 27, AR246: 27, AR168: 27, AR311: 26, |
| | | | | AR171: 26, AR244: 25, AR205: 25, AR165: 25, AR280: 24, AR198: 24, AR164: 24, AR216: 23, AR192: 23, AR166: 23, AR241: 23, |
| | | | | AR213: 23, AR271: 22, AR162: 22, AR314: 22, AR245: 22, AR163: 21, AR261: 21, AR197: 21, AR265: 21, AR161: 20, AR217: 20, |
| | | | | AR215: 20, AR225: 19, AR243: 19, AR309: 19, AR053: 19, AR310: 18, AR221: 18, AR033: 18, AR295: 17, AR236: 17, AR273: 17, |
| | | | | AR204: 17, AR242: 17, AR274: 16, AR196: 16, AR201: 15, AR240: 15, AR288: 15, AR052: 15, AR252: 15, AR282: 15, AR193: 14, |
| | | | | AR177: 14, AR312: 14, AR251: 14, AR174: 14, AR275: 13, AR247: 13, AR211: 13, AR089: 13, AR181: 13, AR297: 13, AR210: 12, |
| | | | | AR039: 12, AR277: 12, AR284: 12, AR299: 12, AR188: 12, AR232: 12, AR283: 12, AR300: 12, AR266: 12, AR272: 12, AR096: 12, |
| | | | | AR176: 12, AR289: 11, AR180: 11, AR229: 11, AR199: 11, AR238: 11, AR313: 11, AR291: 11, AR285: 11, AR191: 11, AR178: 11, |
| | | | | AR262: 11, AR292: 10, AR186: 10, AR316: 10, AR239: 10, AR226: 10, AR230: 10, AR173: 10, AR231: 10, AR250: 9, AR227: 9, |
| | | | | AR055: 9, AR286: 9, AR219: 9, AR293: 9, AR185: 9, AR296: 9, AR255: 9, AR104: 9, AR175: 9, AR200: 9, AR258: 9, AR298: 9, |
| | | | | AR253: 9, AR237: 9, AR218: 9, AR190: 9, AR287: 9, AR183: 8, AR268: 8, AR203: 8, AR260: 8, AR234: 8, AR257: 8, AR179: 8, |
| | | | | AR189: 8, AR254: 8, AR269: 8, AR270: 8, AR182: 8, AR061: 8, AR256: 7, AR248: 7, AR233: 7, AR060: 7, AR294: 7, AR228: 7, |
| | | | | AR259: 6, AR290: 6, AR267: 6, AR249: 5, AR184: 5 L0748: 5, H0046: 2, H0012: 2, H0620: 2, L0804: 2, L0747: 2, H0624: 1, |
| | | | | H0662: 1, S0356: 1, S0358: 1, H0602: 1, H0592: 1, H0013: 1, H0042: 1, T0110: 1, H0231: 1, H0622: 1, H0264: 1, H0494: 1, L0771: 1 |
| | | | | L0666: 1, S0374: 1, H0693: 1, H0593: 1, H0670: 1, H0672: 1, L0749: 1, L0779: 1, L0758: 1, L0596: 1 and H0506: 1. |
| | HCNSM70 | 589445 | 203 | |
| 26 | HCUIM65 | 550208 | 36 | AR223: 4, AR215: 3, AR268: 3, AR270: 3, AR250: 3, AR161: 3, AR246: 3, AR162: 3, AR166: 2, AR171: 2, AR254: 2, AR217: 2, |
| | | | | AR213: 2, AR177: 2, AR089: 2, AR243: 2, AR290: 2, AR257: 2, AR269: 2, AR288: 1, AR313: 1, AR179: 1, AR205: 1, AR309: 1, |
| | | | | AR165: 1, AR163: 1, AR170: 1, AR261: 1, AR225: 1, AR195: 1, AR240: 1, AR181: 1, AR238: 1, AR193: 1, AR299: 1 L0789: 4, |
| | | | | L0809: 2, L0759: 2, L0596: 2, H0306: 1, H0402: 1, H0580: 1, H0550: 1, H0370: 1, H0404: 1, H0559: 1, H0486: 1, H0031: 1, |
| | | | | H0674: 1, H0135: 1, H0100: 1, L0800: 1, L0794: 1, L0804: 1, L0805: 1, L0515: 1, L0783: 1, H0672: 1, L0777: 1, H0444: 1 and |
| | | | | H0352: 1. |
| 27 | HCWDS72 | 707833 | 37 | AR194: 5, AR162: 5, AR241: 4, AR215: 4, AR249: 4, AR313: 3, AR221: 3, AR207: 3, AR310: 3, AR169: 3, AR265: 3, AR229: 3, |
| | | | | AR183: 3, AR298: 2, AR282: 2, AR284: 2, AR291: 2, AR292: 2, AR270: 2, AR312: 2, AR223: 2, AR165: 2, AR273: 2, AR182: 2, |
| | | | | AR164: 2, AR227: 2, AR240: 2, AR289: 2, AR166: 2, AR172: 2, AR266: 2, AR246: 2, AR061: 2, AR222: 2, AR293: 2, AR269: 2, |
| | | | | AR053: 2, AR171: 2, AR238: 2, AR295: 2, AR271: 1, AR177: 1, AR163: 1, AR299: 1, AR052: 1, AR290: 1, AR039: 1, AR231: 1, |
| | | | | AR296: 1, AR096: 1, AR178: 1, AR186: 1, AR232: 1, AR294: 1, AR285: 1, AR286: 1, AR192: 1, AR233: 1, AR268: 1, AR247: 1, |
| | | | | AR161: 1, AR230: 1, AR274: 1, AR226: 1, AR210: 1, AR300: 1, AR089: 1, AR311: 1, AR277: 1, AR234: 1, AR237: 1, AR193: 1, |
| | | | | AR206: 1, AR259: 1, AR201: 1, AR168: 1, AR216: 1 L0752: 30, L0754: 17, L0740: 16, H0521: 14, L0439: 14, L0766: 12, |
| | | | | S0003: 11, S0214: 11, L0777: 10, S0002: 8, L0770: 8, L0776: 8, L0748: 8, L0755: 8, S0360: 7, L0665: 7, L0757: 7, T0067: 6, |
| | | | | S0440: 6, L0666: 6, L0747: 6, L0774: 5, L0751: 5, S0222: 4, H0575: 4, H0622: 4, L0662: 4, L0775: 4, H0547: 4, S0126: 4, S0380: 4, |
| | | | | L0750: 4, L0758: 4, S0436: 4, L0362: 4, H0638: 3, H0580: 3, H0494: 3, S0422: 3, L0598: 3, S0374: 3, H0710: 3, H0522: 3, H0555: 3, |
| | | | | L0356: 3, L0756: 3, L0780: 3, L0731: 3, L0759: 3, L0594: 3, S0134: 2, S0376: 2, S0046: 2, H0393: 2, S0278: 2, H0438: 2, H0586: 2, |
| | | | | L2477: 2, H0156: 2, S0474: 2, H0581: 2, H0421: 2, T0110: 2, L0471: 2, S6028: 2, S0022: 2, H0090: 2, H0591: 2, H0040: 2, H0551: 2, |
| | | | | H0412: 2, L0520: 2, L0764: 2, L0768: 2, L0803: 2, L0655: 2, L0807: 2, L0659: 2, L0664: 2, L0438: 2, H0648: 2, H0672: 2, S0406: 2, |
| | | | | S0028: 2, L0588: 2, L0599: 2, H0667: 2, S0196: 2, H0624: 1, H0171: 1, H0265: 1, S0040: 1, H0713: 1, S0114: 1, L0811: 1, H0341: 1, |
| | | | | S0212: 1, S0001: 1, H0661: 1, H0305: 1, S0418: 1, L3649: 1, H0741: 1, S0045: 1, H0747: 1, S0132: 1, S0476: 1, L3089: 1, H0619: 1, |
| | | | | H0415: 1, H0409: 1, L1942: 1, L2495: 1, L3655: 1, H0013: 1, S0010: 1, S0665: 1, H0327: 1, H0046: 1, L0157: 1, S0051: 1, T0010: 1, |
| | | | | H0266: 1, H0179: 1, H0615: 1, H0096: 1, H0031: 1, H0553: 1, L0055: 1, H0674: 1, H0163: 1, H0038: 1, H0264: 1, H0413: 1, |
| | | | | L0564: 1, H0560: 1, H0359: 1, H0509: 1, S0142: 1, S0344: 1, UNKWN: 1, L0369: 1, L0762: 1, L0371: 1, L0796: 1, L0761: 1, |
| | | | | L0373: 1, L0773: 1, L0521: 1, L0794: 1, L0804: 1, L0784: 1, L0518: 1, L0783: 1, L0647: 1, L5622: 1, L5623: 1, L3391: 1, L2657: 1, |
| | | | | L2262: 1, L3636: 1, H0144: 1, H0684: 1, H0659: 1, H0658: 1, S0330: 1, S0152: 1, H0696: 1, S0404: 1, S0037: 1, L0746: 1, L0779: 1, |
| | | | | S0031: 1, H0707: 1, S0434: 1, L0480: 1, L0608: 1, L0604: 1, S0011: 1, S0192: 1, S0456: 1 and H0506: 1. |
| 28 | HCWKC15 | 553621 | 38 | AR313: 9, AR164: 8, AR165: 8, AR166: 8, AR163: 7, AR161: 7, AR162: 7, AR089: 6, AR039: 5, AR173: 5, AR096: 5, AR180: 5, |
| | | | | AR192: 4, AR263: 4, AR299: 4, AR282: 4, AR242: 4, AR053: 4, AR178: 4, AR175: 4, AR247: 4, AR269: 4, AR296: 4, AR257: 3, |
| | | | | AR212: 3, AR174: 3, AR240: 3, AR262: 3, AR196: 3, AR274: 3, AR312: 3, AR234: 3, AR229: 3, AR199: 3, AR243: 3, AR264: 3, |
| | | | | AR185: 3, AR300: 3, AR179: 3, AR311: 3, AR191: 3, AR293: 3, AR181: 3, AR272: 3, AR297: 3, AR213: 3, AR171: 3, AR270: 3, |
| | | | | AR183: 3, AR238: 3, AR236: 3, AR316: 3, AR060: 3, AR308: 3, AR294: 3, AR266: 3, AR226: 3, AR177: 3, AR258: 3, AR285: 2, |
| | | | | AR104: 2, AR233: 2, AR172: 2, AR193: 2, AR197: 2, AR291: 2, AR231: 2, AR188: 2, AR219: 2, AR255: 2, AR275: 2, AR189: 2, |
| | | | | AR237: 2, AR290: 2, AR295: 2, AR287: 2, AR277: 2, AR218: 2, AR267: 2, AR182: 2, AR228: 2, AR268: 2, AR204: 2, AR190: 2, |
| | | | | AR246: 2, AR239: 2, AR232: 2, AR261: 2, AR223: 2, AR201: 2, AR217: 2, AR195: 2, AR260: 1, AR200: 1, AR170: 1, AR286: 1, |
| | | | | AR216: 1, AR288: 1, AR222: 1, AR227: 1, AR230: 1, H0305: 2 and H0589: 1. |
| 29 | HDHEB60 | 499233 | 39 | AR195: 10, AR245: 9, AR242: 9, AR309: 9, AR196: 8, AR192: 8, AR225: 8, AR198: 8, AR207: 8, AR246: 8, AR169: 8, AR170: 8, |
| | | | | AR223: 8, AR224: 7, AR214: 7, AR039: 7, AR172: 7, AR215: 7, AR201: 7, AR222: 7, AR193: 7, AR205: 7, AR221: 7, AR199: 7, |
| | | | | AR272: 7, AR168: 7, AR089: 7, AR213: 6, AR263: 6, AR165: 6, AR216: 6, AR164: 6, AR274: 6, AR217: 6, AR261: 6, AR053: 6, |
| | | | | AR166: 6, AR055: 6, AR312: 6, AR308: 6, AR197: 6, AR283: 5, AR240: 5, AR282: 5, AR171: 5, AR253: 5, AR235: 5, AR311: 5, |
| | | | | AR295: 5, AR250: 5, AR275: 5, AR243: 5, AR291: 5, AR162: 5, AR297: 5, AR264: 5, AR313: 5, AR288: 5, AR316: 5, AR204: 5, |
| | | | | AR163: 5, AR299: 5, AR161: 5, AR257: 5, AR286: 5, AR271: 5, AR189: 5, AR236: 5, AR210: 5, AR177: 5, AR060: 4, AR212: 4, |
| | | | | AR033: 4, AR285: 4, AR188: 4, AR200: 4, AR174: 4, AR287: 4, AR096: 4, AR296: 4, AR258: 4, AR175: 4, AR218: 4, AR176: 4, |
| | | | | AR293: 4, AR180: 4, AR191: 4, AR203: 4, AR219: 4, AR289: 4, AR277: 4, AR256: 4, AR183: 4, AR190: 4, AR247: 4, AR300: 4, |
| | | | | AR181: 3, AR269: 3, AR173: 3, AR262: 3, AR238: 3, AR268: 3, AR178: 3, AR185: 3, AR255: 3, AR270: 3, AR294: 3, AR266: 3, |
| | | | | AR211: 3, AR260: 3, AR229: 3, AR104: 3, AR231: 3, AR267: 3, AR239: 3, AR290: 3, AR182: 3, AR226: 3, AR232: 3, AR061: 2, |
| | | | | AR233: 2, AR237: 2, AR227: 2, AR234: 2, AR179: 2, AR230: 2, AR228: 2 H0265: 2, S0442: 2, S0360: 2, H0581: 2, H0052: 2, |
| | | | | H0570: 2, H0087: 2, L0439: 2, H0445: 2, H0650: 1, S0354: 1, H0580: 1, H0741: 1, H0586: 1, H0559: 1, H0486: 1, L0021: 1, |
| | | | | H0618: 1, H0009: 1, H0571: 1, S0051: 1, S0368: 1, H0553: 1, H0181: 1, H0551: 1, S0294: 1, L3905: 1, L0646: 1, L0764: 1, L0662: 1, |
| | | | | L0794: 1, L0658: 1, L0659: 1, L0665: 1, H0547: 1, H0682: 1, H0684: 1, H0670: 1 and S3014: 1. |
| 30 | HDPBA28 | 1062783 | 40 | AR249: 72, AR213: 48, AR253: 40, AR096: 37, AR052: 37, AR263: 33, AR053: 32, AR212: 31, AR265: 27, AR184: 26, AR254: 26, |
| | | | | AR264: 22, AR248: 18, AR251: 17, AR240: 17, AR313: 16, AR268: 14, AR272: 13, AR290: 13, AR311: 13, AR310: 13, AR177: 13, |
| | | | | AR180: 13, AR246: 13, AR245: 10, AR250: 10, AR309: 10, AR275: 10, AR183: 9, AR247: 9, AR274: 9, AR312: 9, AR039: 9, |
| | | | | AR308: 9, AR269: 9, AR271: 8, AR179: 8, AR270: 8, AR267: 8, AR316: 7, AR198: 7, AR252: 7, AR244: 7, AR243: 7, AR175: 6, |
| | | | | AR193: 6, AR195: 6, AR165: 6, AR299: 6, AR192: 6, AR166: 6, AR201: 6, AR164: 6, AR162: 6, AR161: 6, AR242: 6, AR163: 6, |
| | | | | AR273: 6, AR300: 5, AR197: 5, AR284: 5, AR282: 5, AR055: 5, AR181: 4, AR169: 4, AR174: 4, AR185: 4, AR061: 4, AR089: 4, |
| | | | | AR298: 4, AR259: 4, AR234: 4, AR293: 3, AR182: 3, AR202: 3, AR205: 3, AR231: 3, AR215: 3, AR283: 3, AR236: 3, AR225: 3, |
| | | | | AR173: 2, AR178: 2, AR060: 2, AR294: 2, AR186: 2, AR296: 2, AR222: 2, AR285: 2, AR281: 2, AR104: 2, AR292: 2, AR176: 2, |
| | | | | AR295: 2, AR207: 2, AR217: 2, AR229: 2, AR289: 2, AR226: 2, AR291: 2, AR206: 2, AR172: 2, AR288: 2, AR033: 2, AR235: 2, |
| | | | | AR238: 2, AR191: 2, AR170: 2, AR194: 2, AR232: 2, AR230: 2, AR286: 2, AR189: 1, AR257: 1, AR190: 1, AR199: 1, AR277: 1, |
| | | | | AR287: 1, AR200: 1, AR224: 1, AR171: 1, AR297: 1, AR223: 1, AR168: 1, AR228: 1, AR266: 1, AR258: 1, AR233: 1, AR204: 1, |
| | | | | AR262: 1, AR315: 1, AR255: 1, AR237: 1, AR280: 1 H0521: 4, L0454: 2, S0442: 2, L0758: 2, H0720: 1, H0255: 1, S0376: 1, |
| | | | | H0486: 1, H0581: 1, H0373: 1, H0268: 1, S0440: 1, L0763: 1, L0803: 1, H0435: 1, H0658: 1, L3833: 1, H0522: 1, L0748: 1, L0749: 1, |
| | | | | L0588: 1 and H0543: 1. |
| | HDPBA28 | 866429 | 204 | |
| 31 | HDPCL63 | 1019008 | 41 | AR281: 19, AR202: 15, AR194: 15, AR196: 14, AR315: 13, AR207: 13, AR206: 13, AR265: 13, AR205: 12, AR244: 12, AR195: 12, |
| | | | | AR222: 11, AR033: 11, AR235: 10, AR214: 10, AR263: 10, AR225: 10, AR218: 10, AR246: 10, AR197: 10, AR261: 10, AR284: 10, |
| | | | | AR310: 10, AR170: 10, AR242: 10, AR224: 10, AR198: 10, AR162: 10, AR311: 9, AR161: 9, AR172: 9, AR192: 9, AR241: 9, |
| | | | | AR169: 9, AR223: 9, AR171: 9, AR291: 9, AR183: 9, AR314: 9, AR273: 9, AR215: 9, AR163: 9, AR298: 9, AR216: 8, AR295: 8, |
| | | | | AR217: 8, AR174: 8, AR240: 8, AR280: 8, AR282: 8, AR275: 8, AR193: 8, AR181: 8, AR243: 8, AR245: 8, AR252: 8, AR221: 8 |
| | | | | AR168: 8, AR264: 8, AR219: 8, AR285: 8, AR271: 8, AR165: 7, AR176: 7, AR177: 7, AR201: 7, AR296: 7, AR211: 7, AR191: 7, |
| | | | | AR270: 7, AR212: 7, AR175: 7, AR164: 7, AR269: 7, AR247: 7, AR184: 7, AR289: 7, AR288: 7, AR309: 7, AR286: 7, AR210: 7, |
| | | | | AR213: 7, AR268: 7, AR250: 7, AR200: 7, AR287: 7, AR189: 7, AR292: 7, AR053: 7, AR266: 7, AR104: 6, AR173: 6, AR204: 6, |
| | | | | AR297: 6, AR283: 6, AR272: 6, AR290: 6, AR236: 6, AR182: 6, AR312: 6, AR308: 6, AR180: 6, AR096: 6, AR277: 6, AR188: 6, |
| | | | | AR293: 6, AR186: 6, AR299: 6, AR190: 5, AR052: 5, AR300: 5, AR199: 5, AR039: 5, AR251: 5, AR089: 5, AR249: 5, AR178: 5, |
| | | | | AR231: 5, AR294: 5, AR248: 5, AR274: 5, AR316: 5, AR055: 4, AR232: 4, AR257: 4, AR267: 4, AR313: 4, AR262: 4, AR258: 4, |
| | | | | AR234: 4, AR238: 4, AR229: 4, AR203: 4, AR254: 4, AR256: 3, AR061: 3, AR255: 3, AR179: 3, AR226: 3, AR185: 3, AR259: 3, |
| | | | | AR227: 3, AR260: 3, AR230: 3, AR060: 3, AR239: 3, AR233: 3, AR237: 3, AR253: 2, AR228: 2 L0751: 8, L0439: 6, L0659: 5, |
| | | | | L0438: 4, L0744: 4, L0754: 4, L0777: 4, S0046: 3, H0052: 3, H0009: 3, H0271: 3, L0662: 3, L0665: 3, L0747: 3, H0740: 2, S0358: 2, |
| | | | | H0586: 2, H0251: 2, H0100: 2, L3905: 2, L0794: 2, L0803: 2, L0809: 2, H0519: 2, S0126: 2, L0749: 2, L0731: 2, L0757: 2, L0605: 2, |
| | | | | H0170: 1, H0717: 1, H0295: 1, H0294: 1, L0785: 1, S0116: 1, H0483: 1, L3659: 1, S0418: 1, H0742: 1, H0735: 1, S0045: 1, H0619: 1, |
| | | | | H0550: 1, H0370: 1, H0592: 1, H0574: 1, H0427: 1, H0599: 1, T0082: 1, S0010: 1, S0049: 1, H0544: 1, H0545: 1, H0570: 1, |
| | | | | H0051: 1, S0388: 1, H0356: 1, H0399: 1, H0266: 1, H0622: 1, L0194: 1, H0135: 1, H0412: 1, H0623: 1, H0059: 1, L0351: 1, |
| | | | | T0042: 1, H0561: 1, S0294: 1, L0640: 1, L4747: 1, L5575: 1, L5565: 1, L0800: 1, L0764: 1, L0648: 1, L0768: 1, L0774: 1, L0776: 1, |
| | | | | L0657: 1, L0559: 1, L0519: 1, L0789: 1, L0792: 1, L0666: 1, L0664: 1, L0709: 1, L3811: 1, H0520: 1, H0547: 1, S0328: 1, S0378: 1, |
| | | | | H0754: 1, S0152: 1, H0521: 1, S0190: 1, S0406: 1, H0436: 1, L0748: 1, L0780: 1, L0759: 1, L0601: 1, L0366: 1 and H0423: 1. |
| | HDPCL63 | 847045 | 205 | |
| | HDPCL63 | 897484 | 206 | |
| 32 | HDPCO25 | 460682 | 42 | AR060: 2, AR055: 2, AR282: 2 H0521: 2, H0445: 2, H0394: 1, H0747: 1, H0581: 1, L0761: 1 and L0750: 1. |
| 33 | HDPFP29 | 628254 | 43 | AR311: 15, AR263: 15, AR223: 14, AR224: 14, AR264: 14, AR214: 14, AR195: 13, AR215: 12, AR222: 12, AR168: 12, AR309: 12, |
| | | | | AR225: 12, AR169: 12, AR161: 11, AR162: 11, AR235: 11, AR163: 11, AR171: 11, AR253: 11, AR217: 11, AR089: 10, AR213: 10, |
| | | | | AR212: 10, AR252: 10, AR207: 10, AR165: 10, AR240: 10, AR172: 10, AR216: 10, AR192: 9, AR053: 9, AR221: 9, AR166: 9, |
| | | | | AR164: 9, AR170: 9, AR245: 9, AR308: 9, AR196: 8, AR282: 8, AR312: 8, AR039: 8, AR246: 8, AR254: 8, AR295: 8, AR198: 8, |
| | | | | AR288: 8, AR096: 7, AR316: 7, AR193: 7, AR277: 7, AR181: 7, AR177: 7, AR261: 7, AR250: 7, AR299: 7, AR060: 7, AR189: 7, |
| | | | | AR205: 7, AR174: 6, AR274: 6, AR191: 6, AR229: 6, AR271: 6, AR201: 6, AR243: 6, AR188: 6, AR210: 6, AR268: 6, AR247: 6, |
| | | | | AR285: 6, AR269: 6, AR197: 6, AR173: 6, AR313: 6, AR199: 6, AR272: 6, AR183: 5, AR175: 5, AR289: 5, AR300: 5, AR297: 5, |
| | | | | AR275: 5, AR200: 5, AR185: 5, AR218: 5, AR180: 5, AR190: 5, AR178: 5, AR238: 5, AR055: 5, AR262: 5, AR211: 5, AR291: 5, |
| | | | | AR290: 5, AR033: 5, AR270: 5, AR203: 5, AR176: 5, AR296: 5, AR104: 5, AR293: 5, AR219: 5, AR287: 5, AR286: 5, AR255: 5, |
| | | | | AR236: 5, AR204: 5, AR234: 4, AR294: 4, AR257: 4, AR266: 4, AR179: 4, AR283: 4, AR239: 4, AR231: 4, AR242: 4, AR182: 4, |
| | | | | AR232: 4, AR258: 4, AR061: 3, AR226: 3, AR230: 3, AR267: 3, AR233: 3, AR227: 3, AR237: 3, AR256: 3, AR228: 3, AR260: 2 |
| | | | | S0474: 6, L0766: 6, L0662: 4, L0748: 4, H0556: 3, L0387: 3, L0659: 3, L0779: 3, H0255: 2, H0402: 2, S0360: 2, S0408: 2, S0410: 2, |
| | | | | H0309: 2, H0591: 2, H0087: 2, L0764: 2, L0809: 2, L0666: 2, L0663: 2, H0648: 2, L0751: 2, L0754: 2, L0747: 2, H0295: 1, S0116: 1, |
| | | | | H0306: 1, S0376: 1, H0747: 1, H0749: 1, H0771: 1, H0455: 1, L0623: 1, H0581: 1, H0052: 1, H0569: 1, H0123: 1, H0428: 1, |
| | | | | H0039: 1, H0622: 1, T0006: 1, H0628: 1, H0673: 1, L0369: 1, L0770: 1, L0769: 1, L0638: 1, L0761: 1, L0667: 1, L0772: 1, L0643: 1, |
| | | | | L0771: 1, L0794: 1, L0803: 1, L0804: 1, L0774: 1, L0806: 1, L0805: 1, L0655: 1, L0657: 1, L0658: 1, L0783: 1, L0519: 1, L0789: 1, |
| | | | | L0352: 1, S0378: 1, H0521: 1, H0478: 1, L0744: 1, L0439: 1, L0777: 1, L0753: 1 and S0434: 1. |
| 34 | HDPGT01 | 771583 | 44 | AR268: 5, AR244: 4, AR282: 3, AR251: 3, AR242: 3, AR241: 3, AR052: 3, AR184: 2, AR271: 2, AR310: 2, AR176: 2, AR194: 2, |
| | | | | AR039: 2, AR309: 2, AR283: 1, AR178: 1, AR289: 1 AR217: 1, AR257: 1, AR277: 1, AR170: 1, AR284: 1, AR221: 1, AR226: 1, |
| | | | | AR265: 1 H0521: 3, S0278: 2, S0222: 2, H0284: 2, H0265: 1, H0728: 1, S0007: 1, H0208: 1, H0586: 1, H0497: 1, H0642: 1, |
| | | | | H0581: 1, H0052: 1, H0572: 1, H0024: 1, H0292: 1, H0428: 1, H0628: 1, H0135: 1, H0163: 1, H0433: 1, S0002: 1, L2263: 1, |
| | | | | L0438: 1, L3829: 1, H0539: 1, S0027: 1, S0032: 1, L0439: 1, S0436: 1, S0458: 1 and H0352: 1. |
| 35 | HDPHI51 | 460679 | 45 | AR195: 9, AR192: 9, AR207: 9, AR215: 8, AR264: 8, AR225: 7, AR263: 7, AR311: 7, AR168: 7, AR309: 7, AR252: 6, AR172: 6, |
| | | | | AR245: 6, AR161: 6, AR162: 6, AR163: 6, AR196: 6, AR223: 6, AR193: 6, AR177: 6, AR246: 6, AR224: 6, AR197: 5, AR308: 5, |
| | | | | AR272: 5, AR214: 5, AR275: 5, AR222: 5, AR253: 5, AR176: 5, AR261: 5, AR295: 5, AR291: 5, AR171: 5, AR218: 5, AR221: 5, |
| | | | | AR219: 5, AR188: 5, AR165: 5, AR096: 5, AR217: 5, AR238: 5, AR288: 5, AR164: 5, AR175: 5, AR166: 5, AR089: 5, AR271: 5, |
| | | | | AR060: 4, AR240: 4, AR183: 4, AR201: 4, AR257: 4, AR169: 4, AR312: 4, AR316: 4, AR039: 4, AR274: 4, AR190: 4, AR191: 4, |
| | | | | AR181: 4, AR178: 4, AR236: 4, AR216: 4, AR180: 4, AR205: 4, AR210: 4, AR270: 4, AR170: 4, AR277: 4, AR243: 4, AR235: 4, |
| | | | | AR212: 4, AR104: 4, AR199: 4, AR189: 4, AR242: 4, AR213: 4, AR255: 4, AR289: 4, AR174: 3, AR285: 3, AR230: 3, AR286: 3, |
| | | | | AR297: 3, AR299: 3, AR283: 3, AR313: 3, AR204: 3, AR287: 3, AR173: 3, AR247: 3, AR229: 3, AR269: 3, AR296: 3, AR182: 3, |
| | | | | AR293: 3, AR266: 3, AR258: 3, AR198: 3, AR237: 3, AR262: 3, AR033: 3, AR239: 3, AR185: 3, AR231: 3, AR203: 3, AR200: 3, |
| | | | | AR179: 3, AR211: 3, AR227: 3, AR268: 3, AR267: 3, AR294: 3, AR290: 3, AR234: 3, AR232: 3, AR226: 3, AR300: 2, AR250: 2, |
| | | | | AR282: 2, AR256: 2, AR061: 2, AR053: 2, AR233: 2, AR260: 2, AR228: 2, AR055: 2 H0521: 1 |
| 36 | HDPJM30 | 879325 | 46 | AR268: 8, AR289: 6, AR184: 6, AR266: 5, AR252: 5, AR223: 5, AR169: 5, AR290: 4, AR286: 4, AR224: 4, AR194: 4, AR257: 4, |
| | | | | AR214: 4, AR310: 4, AR270: 4, AR165: 4, AR294: 3, AR291: 3, AR222: 3, AR183: 3, AR235: 3, AR215: 3, AR282: 3, AR284: 3, |
| | | | | AR297: 3, AR267: 3, AR260: 3, AR217: 2, AR262: 2, AR182: 2, AR258: 2, AR309: 2, AR172: 2, AR288: 2, AR298: 2, AR225: 2, |
| | | | | AR269: 2, AR296: 2, AR176: 2, AR248: 2, AR166: 2, AR216: 2, AR250: 2, AR292: 2, AR164: 2, AR263: 2, AR162: 2, AR287: 2, |
| | | | | AR255: 2, AR053: 2, AR061: 2, AR249: 2, AR163: 2, AR293: 2, AR285: 2, AR253: 2, AR312: 2, AR178: 2, AR313: 2, AR277: 2, |
| | | | | AR256: 2, AR205: 2, AR052: 1, AR203: 1, AR238: 1, AR274: 1, AR171: 1, AR295: 1, AR231: 1, AR247: 1, AR206: 1, AR181: 1, |
| | | | | AR221: 1, AR226: 1, AR230: 1, AR179: 1, AR283: 1, AR232: 1, AR200: 1, AR239: 1, AR186: 1, AR237: 1, AR195: 1, AR228: 1, |
| | | | | AR240: 1, AR233: 1, AR227: 1, AR246: 1, AR199: 1, AR173: 1, AR243: 1, AR089: 1, AR177: 1 L0800: 4, H0617: 3, H0521: 3, |
| | | | | L0070: 3, L0742: 3, L0770: 2, L0771: 2, L0794: 2, H0689: 2, L0741: 2, L0439: 2, H0445: 2, H0224: 1, H0637: 1, H0370: 1, H0250: 1, |
| | | | | H0052: 1, H0194: 1, L0455: 1, S0422: 1, L0761: 1, L0764: 1, L0806: 1, L0659: 1, L5622: 1, L0789: 1, L0790: 1, L0792: 1, H0672: 1, |
| | | | | S0152: 1, S0434: 1 and S0436: 1. |
| | HDPJM30 | 603517 | 207 | |
| 37 | HDPMM88 | 972734 | 47 | AR202: 35, AR096: 34, AR194: 33, AR206: 31, AR244: 25, AR241: 22, AR268: 21, AR281: 20, AR290: 19, AR265: 17, AR315: 15, |
| | | | | AR184: 15, AR246: 15, AR310: 14, AR192: 13, AR269: 12, AR270: 12, AR282: 12, AR243: 11, AR314: 11, AR280: 11, AR267: 10, |
| | | | | AR292: 10, AR183: 9, AR263: 9, AR299: 9, AR284: 9, AR198: 9, AR055: 8, AR205: 8, AR251: 8, AR273: 8, AR266: 8, AR313: 8, |
| | | | | AR298: 8, AR283: 8, AR039: 8, AR033: 8, AR204: 7, AR052: 7, AR277: 7, AR177: 7, AR238: 7, AR234: 7, AR061: 6, AR247: 6, |
| | | | | AR295: 6, AR104: 6, AR300: 6, AR285: 6, AR089: 6, AR316: 6, AR186: 6, AR185: 6, AR240: 5, AR053: 5, AR249: 5, AR231: 5, |
| | | | | AR271: 5, AR291: 5, AR289: 5, AR182: 5, AR312: 5, AR175: 4, AR253: 4, AR229: 4, AR248: 4, AR232: 4, AR309: 4, AR215: 4, |
| | | | | AR226: 4, AR274: 4, AR219: 4, AR286: 4, AR296: 4, AR227: 4, AR237: 4, AR218: 4, AR259: 3, AR275: 3, AR294: 3, AR213: 3, |
| | | | | AR242: 3, AR179: 3, AR293: 3, AR060: 3, AR170: 3, AR193: 3, AR233: 3, AR169: 2, AR224: 2, AR256: 2, AR257: 2, AR258: 2, |
| | | | | AR171: 2, AR217: 2, AR172: 2, AR264: 1, AR195: 1, AR308: 1, AR163: 1, AR261: 1, AR161: 1, AR162: 1, AR199: 1, AR221: 1 |
| | | | | L0754: 2, L0777: 2, H0717: 1, H0740: 1, S0212: 1, S0360: 1, S0408: 1, H0747: 1, H0004: 1, H0581: 1, L0142: 1, H0674: 1, H0646: 1, |
| | | | | S0422: 1, L0809: 1, L0787: 1, H0521: 1 and H0522: 1. |
| | HDPMM88 | 906121 | 208 | |
| | HDPMM88 | 902299 | 209 | |
| | HDPMM88 | 885059 | 210 | |
| | HDPMM88 | 874074 | 211 | |
| | HDPMM88 | 854246 | 212 | |
| | HDPMM88 | 854245 | 213 | |
| 38 | HDPOJ08 | 731863 | 48 | AR250: 19, AR254: 19, AR269: 19, AR268: 16, AR248: 16, AR290: 15, AR249: 13, AR270: 12, AR253: 12, AR183: 10, AR267: 10, |
| | | | | AR180: 10, AR161: 9, AR162: 9, AR165: 9, AR164: 9, AR163: 9, AR181: 8, AR166: 8, AR173: 8, AR174: 8, AR184: 7, AR235: 7, |
| | | | | AR252: 7, AR229: 7, AR272: 7, AR176: 7, AR177: 6, AR178: 6, AR265: 6, AR239: 6, AR182: 6, AR175: 6, AR096: 6, AR291: 5, |
| | | | | AR189: 5, AR288: 5, AR287: 5, AR190: 5, AR251: 5, AR263: 5, AR230: 5, AR179: 5, AR228: 5, AR236: 4, AR234: 4, AR257: 4, |
| | | | | AR193: 4, AR238: 4, AR237: 4, AR285: 4, AR233: 4, AR289: 4, AR185: 4, AR311: 4, AR286: 4, AR308: 4, AR226: 4, AR282: 4, |
| | | | | AR264: 4, AR240: 4, AR232: 4, AR201: 4, AR261: 4, AR292: 4, AR089: 4, AR210: 4, AR212: 4, AR295: 4, AR247: 4, AR297: 4, |
| | | | | AR275: 4, AR262: 4, AR245: 4, AR195: 4, AR188: 4, AR231: 4, AR197: 4, AR309: 4, AR196: 4, AR284: 4, AR191: 4, AR299: 4, |
| | | | | AR313: 3, AR255: 3, AR199: 3, AR200: 3, AR293: 3, AR300: 3, AR316: 3, AR296: 3, AR246: 3, AR203: 3, AR243: 3, AR294: 3, |
| | | | | AR214: 3, AR274: 3, AR104: 3, AR060: 3, AR219: 3, AR298: 3, AR033: 3, AR227: 3, AR053: 3, AR221: 2, AR271: 2, AR312: 2, |
| | | | | AR223: 2, AR218: 2, AR061: 2, AR259: 2, AR224: 2, AR217: 2, AR277: 2, AR225: 2, AR258: 2, AR215: 2, AR039: 2, AR168: 2, |
| | | | | AR266: 2, AR211: 2, AR055: 2, AR222: 2, AR205: 2, AR216: 2, AR202: 1, AR213: 1, AR260: 1, AR256: 1, AR314: 1 S0474: 29, |
| | | | | L0766: 11, H0521: 10, L0803: 7, L0748: 6, L0717: 5, L0759: 5, S0003: 4, L3832: 4, H0663: 3, H0156: 3, L0598: 3, L0770: 3, |
| | | | | L0771: 3, L0804: 3, L2439: 3, H0522: 3, L0731: 3, S0436: 3, H0486: 2, S0426: 2, L0805: 2, L0659: 2, L2260: 2, S0126: 2, S0406: 2, |
| | | | | L0749: 2, L0755: 2, L0757: 2, L0758: 2, L0590: 2, S0026: 2, H0716: 1, H0341: 1, S0212: 1, L0481: 1, S0444: 1, S0360: 1, L3649: 1, |
| | | | | H0637: 1, H0580: 1, H0734: 1, H0749: 1, L3092: 1, H0619: 1, L3388: 1, H0586: 1, H0574: 1, H0427: 1, L0021: 1, H0575: 1, |
| | | | | H0318: 1, H0545: 1, H0024: 1, H0373: 1, H0071: 1, H0179: 1, S0214: 1, H0428: 1, H0674: 1, H0591: 1, H0616: 1, H0488: 1, |
| | | | | H0494: 1, S0438: 1, S0440: 1, H0647: 1, S0142: 1, UNKWN: 1, L0369: 1, L0763: 1, L0769: 1, L0646: 1, L0648: 1, L0662: 1, |
| | | | | L0650: 1, L0775: 1, L0653: 1, L0776: 1, L0656: 1, L0782: 1, L0809: 1, L0519: 1, S0052: 1, L2657: 1, H0144: 1, L3823: 1, H0520: 1, |
| | | | | H0547: 1, H0660: 1, S0380: 1, L0742: 1, L0439: 1, L0750: 1, L0777: 1, S0031: 1, H0445: 1, S0434: 1, H0665: 1, H0667: 1, S0194: 1, |
| | | | | S0276: 1 and S0458: 1. |
| 39 | HDPPN86 | 1037893 | 49 | AR212: 4, AR235: 3, AR266: 2, AR221: 2, AR207: 2, AR205: 2, AR216: 2, AR168: 2, AR282: 2, AR257: 2, AR181: 1, AR311: 1, |
| | | | | AR271: 1, AR161: 1, AR264: 1, AR165: 1, AR172: 1, AR295: 1, AR164: 1, AR162: 1, AR176: 1, AR163: 1, AR171: 1, AR285: 1, |
| | | | | AR289: 1, AR277: 1, AR238: 1, AR089: 1, AR234: 1, AR211: 1 H0542: 4, S0418: 3, H0543: 3, S0038: 2, H0341: 1, L0018: 1, |
| | | | | H0069: 1, H0090: 1, H0056: 1, H0494: 1, H0522: 1 and H0423: 1. |
| | HDPPN86 | 895711 | 214 | |
| 40 | HDPSB18 | 1043263 | 50 | AR197: 9, AR060: 8, AR253: 8, AR161: 8, AR162: 8, AR163: 8, AR165: 8, AR164: 7, AR089: 7, AR166: 7, AR204: 7, AR192: 7, |
| | | | | AR207: 7, AR177: 6, AR193: 6, AR185: 6, AR235: 6, AR271: 6, AR195: 6, AR053: 6, AR312: 6, AR233: 6, AR232: 6, AR174: 5, |
| | | | | AR282: 5, AR104: 5, AR299: 5, AR227: 5, AR212: 5, AR181: 5, AR309: 5, AR264: 5, AR205: 5, AR308: 5, AR178: 5, AR237: 5, |
| | | | | AR061: 5, AR313: 5, AR300: 5, AR175: 5, AR263: 5, AR247: 5, AR223: 5, AR173: 5, AR226: 5, AR272: 5, AR243: 5, AR240: 5, |
| | | | | AR311: 5, AR055: 5, AR269: 5, AR201: 4, AR229: 4, AR286: 4, AR182: 4, AR246: 4, AR236: 4, AR295: 4, AR316: 4, AR285: 4, |
| | | | | AR261: 4, AR293: 4, AR275: 4, AR291: 4, AR228: 4, AR274: 4, AR296: 4, AR176: 4, AR213: 4, AR297: 4, AR179: 4, AR270: 4, |
| | | | | AR254: 4, AR039: 4, AR239: 4, AR262: 4, AR288: 4, AR180: 4, AR287: 4, AR096: 4, AR238: 4, AR183: 4, AR203: 4, AR033: 4, |
| | | | | AR257: 4, AR234: 4, AR230: 4, AR294: 3, AR198: 3, AR289: 3, AR255: 3, AR266: 3, AR258: 3, AR267: 3, AR283: 3, AR168: 3, |
| | | | | AR217: 3, AR231: 3, AR214: 3, AR277: 3, AR252: 3, AR196: 3, AR250: 3, AR218: 3, AR245: 3, AR190: 2, AR216: 2, AR268: 2, |
| | | | | AR224: 2, AR290: 2, AR188: 2, AR191: 2, AR189: 2, AR221: 2, AR260: 2, AR222: 2, AR200: 2, AR171: 2, AR211: 2, AR210: 2, |
| | | | | AR219: 2, AR172: 2, AR199: 2, AR215: 1, AR170: 1, AR225: 1, AR256: 1, L0769: 5, L0774: 3, H0656: 2, S0442: 2, S0358: 2, |
| | | | | S0360: 2, S0278: 2, H0620: 2, L0500: 2, L0775: 2, L0710: 2, L0777: 2, L0752: 2, L0588: 2, H0149: 1, H0295: 1, T0049: 1, H0381: 1, |
| | | | | H0484: 1, H0483: 1, H0638: 1, S0420: 1, S0444: 1, S0408: 1, S0045: 1, H0587: 1, H0318: 1, H0204: 1, H0530: 1, H0545: 1, H0178: 1, |
| | | | | L0471: 1, L0142: 1, H0181: 1, H0087: 1, H0412: 1, H0623: 1, H0100: 1, S0438: 1, H0633: 1, H0646: 1, H0529: 1, L0506: 1, L0761: 1, |
| | | | | L0764: 1, L0648: 1, L0766: 1, L0497: 1, L0493: 1, L0511: 1, L0665: 1, L2260: 1, H0698: 1, H0690: 1, H0521: 1, S0406: 1, S3014: 1, |
| | | | | L0747: 1, L0780: 1, H0543: 1 and H0422: 1. |
| | HDPSB18 | 903816 | 215 | |
| | HDPSB18 | 905414 | 216 | |
| | HDPSB18 | 732097 | 217 | |
| 41 | HDPSH53 | 1309174 | 51 | AR214: 47, AR207: 47, AR263: 40, AR222: 34, AR169: 33, AR235: 33, AR212: 31, AR213: 30, AR223: 29, AR170: 29, AR311: 29, |
| | | | | AR309: 28, AR168: 28, AR195: 27, AR264: 26, AR192: 26, AR224: 26, AR216: 24, AR295: 24, AR171: 24, AR245: 24, AR217: 23, |
| | | | | AR172: 23, AR198: 22, AR308: 22, AR271: 22, AR161: 21, AR162: 21, AR163: 21, AR252: 21, AR261: 21, AR288: 21, AR053: 20, |
| | | | | AR166: 20, AR197: 20, AR242: 20, AR201: 20, AR033: 19, AR205: 19, AR177: 19, AR312: 19, AR193: 19, AR165: 18, AR240: 18, |
| | | | | AR229: 18, AR277: 18, AR254: 18, AR164: 18, AR225: 17, AR246: 17, AR297: 17, AR236: 17, AR285: 16, AR291: 16, AR275: 16, |
| | | | | AR238: 16, AR272: 16, AR174: 15, AR296: 15, AR274: 15, AR232: 15, AR286: 14, AR282: 14, AR230: 13, AR181: 13, AR211: 13, |
| | | | | AR250: 13, AR226: 13, AR239: 13, AR287: 12, AR227: 12, AR283: 12, AR247: 12, AR237: 12, AR289: 12, AR215: 12, AR316: 12, |
| | | | | AR204: 12, AR210: 12, AR176: 12, AR180: 12, AR293: 12, AR231: 11, AR270: 11, AR300: 11, AR299: 11, AR262: 11, AR175: 11, |
| | | | | AR185: 11, AR243: 11, AR196: 11, AR221: 11, AR258: 10, AR269: 10, AR200: 10, AR313: 10, AR089: 10, AR253: 10, AR183: 10, |
| | | | | AR294: 10, AR268: 9, AR061: 9, AR104: 9, AR173: 9, AR234: 9, AR199: 9, AR096: 9, AR179: 9, AR218: 8, AR178: 8, AR233: 8, |
| | | | | AR257: 8, AR219: 8, AR255: 8, AR266: 8, AR290: 8, AR267: 8, AR188: 8, AR228: 8, AR189: 7, AR055: 7, AR060: 7, AR203: 7, |
| | | | | AR191: 7, AR256: 7, AR039: 7, AR260: 6, AR182: 6, AR190: 6 L0804: 2, H0521: 2, L0021: 1, H0617: 1, H0623: 1, L0648: 1 and |
| | | | | L0665: 1. |
| | HDPSH53 | 1040056 | 218 | |
| | HDPSH53 | 882768 | 219 | |
| 42 | HDPSP01 | 1352280 | 52 | AR169: 8, AR235: 5, AR265: 5, AR180: 4, AR176: 4, AR161: 4, AR163: 4, AR311: 4, AR162: 4, AR269: 3, AR165: 3, AR172: 3, |
| | | | | AR171: 3, AR222: 3, AR166: 3, AR183: 3, AR225: 3, AR168: 3, AR282: 3, AR224: 3, AR245: 3, AR272: 3, AR196: 3, AR223: 3, |
| | | | | AR297: 3, AR221: 2, AR182: 2, AR298: 2, AR164: 2, AR261: 2, AR257: 2, AR170: 2, AR270: 2, AR289: 2, AR216: 2, AR173: 2, |
| | | | | AR191: 2, AR214: 2, AR287: 2, AR296: 2, AR242: 2, AR228: 2, AR247: 2, AR295: 2, AR255: 2, AR192: 2, AR240: 2, AR174: 2, |
| | | | | AR227: 2, AR053: 2, AR275: 2, AR203: 2, AR266: 2, AR288: 2, AR215: 2, AR277: 2, AR239: 2, AR291: 2, AR264: 2, AR263: 2, |
| | | | | AR285: 2, AR230: 2, AR190: 2, AR310: 2, AR189: 2, AR274: 1, AR181: 1, AR286: 1, AR179: 1, AR226: 1, AR246: 1, AR231: 1, |
| | | | | AR178: 1, AR175: 1, AR238: 1, AR233: 1, AR273: 1, AR290: 1, AR243: 1, AR200: 1, AR293: 1, AR294: 1, AR309: 1, AR284: 1, |
| | | | | AR312: 1, AR313: 1, AR234: 1, AR229: 1, AR061: 1, AR300: 1, AR217: 1, AR268: 1, AR292: 1, AR089: 1, AR262: 1, L0769: 6, |
| | | | | L0751: 5, L0752: 5, H0617: 4, L0806: 4, L0731: 4, L0771: 3, L0774: 3, H0370: 2, S0314: 2, H0551: 2, H0059: 2, L0792: 2, L0745: 2, |
| | | | | L0750: 2, L0777: 2, S0444: 1, H0728: 1, S0132: 1, H0550: 1, H0392: 1, H0586: 1, H0427: 1, H0618: 1, H0052: 1, H0545: 1, H0123: 1, |
| | | | | H0620: 1, S0051: 1, H0135: 1, H0100: 1, H0494: 1, L0800: 1, L0764: 1, L0804: 1, L0775: 1, L0805: 1, L0783: 1, L0809: 1, L0666: 1, |
| | | | | L0665: 1, H0684: 1, S0328: 1, H0521: 1, H0555: 1, H0478: 1, L0743: 1, L0747: 1, L0779: 1, L0780: 1, L0755: 1 and S0434: 1. |
| | HDPSP01 | 689129 | 220 | |
| 43 | HDPSP54 | 744440 | 53 | AR263: 53, AR207: 53, AR214: 51, AR169: 41, AR224: 40, AR222: 38, AR223: 37, AR195: 36, AR235: 32, AR217: 31, AR212: 31, |
| | | | | AR168: 30, AR172: 30, AR311: 29, AR053: 28, AR192: 28, AR196: 28, AR171: 27, AR198: 27, AR213: 27, AR221: 27, AR161: 26, |
| | | | | AR264: 26, AR252: 26, AR162: 25, AR170: 25, AR210: 25, AR245: 24, AR033: 23, AR225: 23, AR216: 23, AR163: 22, AR089: 22, |
| | | | | AR261: 22, AR215: 21, AR271: 21, AR177: 21, AR181: 21, AR104: 21, AR295: 20, AR218: 20, AR236: 19, AR193: 19, AR191: 19, |
| | | | | AR211: 19, AR197: 18, AR185: 18, AR055: 18, AR219: 18, AR201: 18, AR240: 18, AR165: 17, AR316: 17, AR166: 17, AR299: 17, |
| | | | | AR164: 17, AR060: 17, AR253: 17, AR174: 16, AR242: 16, AR288: 16, AR199: 16, AR205: 16, AR246: 15, AR282: 15, AR039: 15, |
| | | | | AR238: 15, AR308: 15, AR229: 15, AR175: 14, AR188: 14, AR285: 14, AR297: 14, AR254: 14, AR189: 14, AR232: 14, AR277: 13, |
| | | | | AR300: 13, AR287: 13, AR243: 13, AR230: 13, AR312: 13, AR291: 13, AR286: 12, AR204: 12, AR250: 12, AR226: 12, AR173: 12, |
| | | | | AR200: 12, AR239: 12, AR176: 12, AR274: 11, AR296: 11, AR096: 11, AR309: 11, AR203: 11, AR231: 11, AR270: 11, AR247: 11, |
| | | | | AR293: 11, AR190: 11, AR283: 10, AR258: 10, AR267: 10, AR234: 10, AR289: 10, AR262: 10, AR178: 10, AR268: 10, AR227: 10, |
| | | | | AR313: 10, AR180: 10, AR237: 10, AR179: 9, AR257: 9, AR182: 9, AR269: 9, AR255: 9, AR233: 9, AR260: 9, AR061: 9, |
| | | | | AR183: 9, AR290: 8, AR275: 8, AR272: 8, AR266: 8, AR294: 7, AR256: 7, AR228: 6 L0740: 8, L0662: 3, L0659: 3, L0663: 3, |
| | | | | S0422: 2, L0646: 2, L0766: 2, L0439: 2, L0779: 2, H0171: 1, S6024: 1, S0110: 1, S0360: 1, H0411: 1, H0455: 1, S0474: 1, H0510: 1, |
| | | | | S0438: 1, L0637: 1, L5565: 1, L0771: 1, L0773: 1, L0794: 1, L0804: 1, L0787: 1, L0665: 1, L0438: 1, H0521: 1, S0406: 1, L0754: 1, |
| | | | | L0755: 1 and L0758: 1. |
| | HDPSP54 | 502472 | 221 | |
| 44 | HDPUW68 | 812737 | 54 | AR253: 15, AR052: 14, AR213: 11, AR184: 11, AR230: 11, AR228: 9, AR170: 9, AR250: 8, AR168: 8, AR254: 8, AR225: 6, |
| | | | | AR297: 6, AR053: 6, AR251: 5, AR267: 5, AR248: 5, AR268: 5, AR221: 5, AR096: 5, AR214: 5, AR238: 5, AR178: 5, AR249: 5, |
| | | | | AR216: 5, AR173: 5, AR239: 5, AR236: 5, AR166: 5, AR182: 4, AR161: 4, AR162: 4, AR217: 4, AR269: 4, AR282: 4, AR163: 4, |
| | | | | AR224: 4, AR222: 4, AR237: 4, AR296: 4, AR257: 4, AR263: 4, AR244: 4, AR227: 4, AR258: 4, AR252: 4, AR291: 4, AR229: 4, |
| | | | | AR219: 4, AR287: 4, AR290: 4, AR275: 4, AR264: 4, AR183: 4, AR175: 4, AR223: 4, AR199: 4, AR308: 4, AR171: 3, AR194: 3, |
| | | | | AR246: 3, AR277: 3, AR260: 3, AR288: 3, AR240: 3, AR274: 3, AR191: 3, AR284: 3, AR243: 3, AR312: 3, AR293: 3, AR179: 3, |
| | | | | AR233: 3, AR300: 3, AR261: 3, AR218: 3, AR165: 3, AR061: 3, AR231: 3, AR033: 3, AR298: 3, AR316: 3, AR164: 3, AR181: 3, |
| | | | | AR255: 3, AR270: 3, AR189: 3, AR313: 3, AR309: 3, AR234: 2, AR186: 2, AR247: 2, AR195: 2, AR285: 2, AR232: 2, AR292: 2, |
| | | | | AR185: 2, AR226: 2, AR180: 2, AR299: 2, AR289: 2, AR271: 2, AR193: 2, AR089: 2, AR203: 2, AR311: 2, AR060: 2, AR172: 2, |
| | | | | AR310: 2, AR215: 2, AR177: 2, AR266: 2, AR262: 2, AR272: 2, AR188: 2, AR196: 2, AR169: 1, AR212: 1, AR210: 1, AR055: 1, |
| | | | | AR283: 1, AR190: 1, AR241: 1, AR295: 1, AR286: 1, AR201: 1, AR294: 1, AR104: 1, AR256: 1, AR205: 1, AR039: 1, H0677: 47, |
| | | | | H0521: 14, H0295: 3, H0587: 3, H0556: 2, H0656: 2, H0638: 2, H0411: 2, S0002: 2, L0766: 2, L0776: 2, L0659: 2, L0809: 2, |
| | | | | H0670: 2, H0522: 2, S0404: 2, L0743: 2, L0744: 2, L0740: 2, L0731: 2, S0134: 1, H0657: 1, H0254: 1, S0476: 1, S0278: 1, H0486: 1, |
| | | | | H0575: 1, H0606: 1, H0135: 1, H0561: 1, S0438: 1, L0761: 1, L0768: 1, L0655: 1, L2261: 1, S0374: 1, H0690: 1, H0435: 1, H0658: 1, |
| | | | | H0696: 1, H0678: 1, L0779: 1, L0752: 1, H0445: 1, S0434: 1 and S0436: 1. |
| 45 | HDPXY01 | 879048 | 55 | AR207: 8, AR165: 8, AR245: 8, AR214: 8, AR164: 8, AR275: 8, AR163: 8, AR162: 8, AR263: 8, AR169: 8, AR195: 7, AR166: 7, |
| | | | | AR274: 7, AR161: 7, AR309: 7, AR272: 7, AR170: 7, AR212: 7, AR308: 6, AR311: 6, AR198: 6, AR089: 6, AR060: 6, AR197: 6, |
| | | | | AR192: 6, AR264: 6, AR039: 6, AR177: 6, AR243: 6, AR223: 6, AR235: 5, AR213: 5, AR096: 5, AR282: 5, AR168: 5, AR313: 5, |
| | | | | AR222: 5, AR240: 5, AR204: 5, AR217: 5, AR261: 5, AR193: 4, AR312: 4, AR104: 4, AR224: 4, AR246: 4, AR176: 4, AR055: 4, |
| | | | | AR299: 4, AR171: 4, AR283: 4, AR271: 4, AR277: 4, AR174: 4, AR316: 4, AR178: 4, AR295: 4, AR053: 4, AR205: 4, AR185: 4, |
| | | | | AR237: 4, AR033: 4, AR247: 4, AR300: 4, AR266: 4, AR257: 3, AR270: 3, AR181: 3, AR293: 3, AR233: 3, AR250: 3, AR225: 3, |
| | | | | AR288: 3, AR291: 3, AR216: 3, AR296: 3, AR201: 3, AR286: 3, AR285: 3, AR268: 3, AR228: 3, AR297: 3, AR254: 3, AR294: 3, |
| | | | | AR252: 3, AR269: 3, AR229: 3, AR287: 3, AR232: 3, AR061: 3, AR234: 3, AR289: 3, AR183: 3, AR227: 3, AR231: 3, AR211: 3, |
| | | | | AR267: 3, AR230: 3, AR255: 3, AR236: 3, AR239: 2, AR226: 2, AR179: 2, AR200: 2, AR182: 2, AR262: 2, AR175: 2, AR203: 2, |
| | | | | AR180: 2, AR290: 2, AR196: 2, AR199: 2, AR189: 2, AR258: 2, AR173: 2, AR210: 2, AR191: 2, AR238: 1, AR190: 1, AR253: 1, |
| | | | | AR215: 1, AR172: 1 L0646: 4, L0666: 4, L0662: 3, L0749: 3, H0661: 2, H0620: 2, H0617: 2, H0144: 2, L0777: 2, L0731: 2, |
| | | | | H0170: 1, S0360: 1, S0046: 1, L0717: 1, H0013: 1, H0052: 1, H0039: 1, H0622: 1, H0606: 1, H0673: 1, L0769: 1, L0796: 1, L5565: 1, |
| | | | | L5566: 1, L0764: 1, L0648: 1, L0381: 1, L0805: 1, L0659: 1, L0789: 1, L0792: 1, L0663: 1, L0665: 1, H0689: 1, H0660: 1, H0648: 1, |
| | | | | H0539: 1, H0521: 1, L0779: 1 and L0603: 1. |
| | HDPXY01 | 904768 | 222 | |
| | HDPXY01 | 895716 | 223 | |
| | HDPXY01 | 895715 | 224 | |
| 46 | HDTBD53 | 972757 | 56 | AR242: 4, AR246: 4, AR250: 3, AR263: 3, AR195: 3, AR272: 3, AR264: 3, AR170: 3, AR282: 3, AR215: 3, AR163: 3, AR162: 3, |
| | | | | AR235: 3, AR089: 3, AR198: 3, AR165: 3, AR161: 3, AR197: 2, AR266: 2, AR053: 2, AR169: 2, AR212: 2, AR205: 2, AR285: 2, |
| | | | | AR243: 2, AR312: 2, AR240: 2, AR270: 2, AR221: 2, AR296: 2, AR213: 2, AR178: 2, AR216: 2, AR261: 2, AR214: 2, AR299: 2, |
| | | | | AR247: 2, AR060: 2, AR164: 2, AR267: 1, AR237: 1, AR183: 1, AR271: 1, AR172: 1, AR286: 1, AR179: 1, AR166: 1, AR291: 1, |
| | | | | AR311: 1, AR316: 1, AR313: 1, AR288: 1, AR171: 1, AR188: 1, AR268: 1, AR269: 1, AR308: 1, AR173: 1, AR287: 1, AR297: 1, |
| | | | | AR033: 1 L0439: 17, L0731: 17, L0747: 16, L0766: 13, S0360: 8, L0770: 8, L0659: 8, L0754: 8, H0553: 7, L0663: 7, L0749: 7, |
| | | | | L0758: 7, H0486: 6, S0192: 6, L0662: 5, L0105: 4, H0644: 4, L0438: 4, H0547: 4, L0748: 4, L0751: 4, L0752: 4, L0755: 4, L0599: 4, |
| | | | | H0542: 4, H0556: 3, H0662: 3, S0420: 3, H0599: 3, H0050: 3, H0266: 3, H0622: 3, H0135: 3, H0551: 3, H0529: 3, L0783: 3, |
| | | | | H0519: 3, H0670: 3, H0521: 3, H0555: 3, L0750: 3, H0717: 2, H0663: 2, H0638: 2, S0476: 2, H0592: 2, H0013: 2, H0598: 2, |
| | | | | H0090: 2, H0038: 2, H0040: 2, H0494: 2, S0440: 2, S0344: 2, L0638: 2, L0761: 2, L0764: 2, L0649: 2, L0774: 2, L0775: 2, L0657: 2, |
| | | | | L0787: 2, L0666: 2, H0144: 2, L0565: 2, H0659: 2, S0044: 2, L0759: 2, S0194: 2, H0422: 2, H0170: 1, S0040: 1, H0713: 1, T0049: 1, |
| | | | | S0134: 1, S0110: 1, H0402: 1, S0356: 1, S0442: 1, S0354: 1, S0376: 1, S0444: 1, S0410: 1, S0300: 1, H0369: 1, H0261: 1, H0549: 1, |
| | | | | H0550: 1, S0222: 1, H0586: 1, H0587: 1, L0586: 1, T0060: 1, H0244: 1, S0280: 1, L0021: 1, H0025: 1, H0421: 1, H0309: 1, L0040: 1, |
| | | | | H0544: 1, L0471: 1, H0024: 1, L0163: 1, S0388: 1, H0188: 1, H0687: 1, S0003: 1, H0615: 1, H0039: 1, H0030: 1, H0674: 1, H0212: 1, |
| | | | | H0068: 1, S0366: 1, H0163: 1, H0591: 1, H0634: 1, H0616: 1, H0412: 1, H0413: 1, H0623: 1, H0561: 1, H0641: 1, H0647: 1, |
| | | | | H0652: 1, S0144: 1, S0142: 1, S0002: 1, L0369: 1, L0769: 1, L5575: 1, L5565: 1, L3905: 1, L5566: 1, L0772: 1, L0800: 1, L0771: 1, |
| | | | | L0521: 1, L0768: 1, L0794: 1, L0381: 1, L0806: 1, L0654: 1, L0655: 1, L0636: 1, L0384: 1, L0809: 1, L0528: 1, L0788: 1, L0789: 1, |
| | | | | S0126: 1, H0689: 1, H0682: 1, H0658: 1, H0648: 1, S0328: 1, H0539: 1, H0696: 1, S0406: 1, L0740: 1, L0757: 1, L0603: 1, H0665: 1, |
| | | | | S0196: 1, H0423: 1 and S0460: 1. |
| | HDTBD53 | 906342 | 225 | |
| 47 | HDTBV77 | 785879 | 57 | AR183: 7, AR184: 5, AR269: 4, AR207: 4, AR245: 4, AR270: 4, AR182: 4, AR214: 4, AR172: 4, AR223: 4, AR263: 3, AR272: 3, |
| | | | | AR180: 3, AR176: 3, AR268: 3, AR309: 3, AR175: 3, AR164: 3, AR282: 3, AR166: 3, AR222: 3, AR225: 3, AR216: 3, AR308: 3, |
| | | | | AR052: 3, AR247: 3, AR289: 3, AR165: 3, AR266: 2, AR312: 2, AR162: 2, AR169: 2, AR291: 2, AR297: 2, AR284: 2, AR193: 2, |
| | | | | AR205: 2, AR257: 2, AR296: 2, AR267: 2, AR195: 2, AR265: 2, AR171: 2, AR217: 2, AR298: 2, AR246: 2, AR202: 2, AR264: 2, |
| | | | | AR229: 2, AR238: 2, AR277: 2, AR213: 2, AR178: 2, AR230: 2, AR313: 2, AR243: 2, AR288: 2, AR311: 2, AR161: 2, AR235: 2, |
| | | | | AR253: 2, AR168: 2, AR290: 2, AR294: 2, AR215: 2, AR224: 2, AR286: 2, AR181: 2, AR212: 2, AR287: 2, AR173: 2, AR221: 2, |
| | | | | AR039: 2, AR163: 2, AR200: 2, AR061: 2, AR170: 2, AR274: 2, AR053: 2, AR089: 2, AR236: 2, AR228: 2, AR293: 2, AR199: 2, |
| | | | | AR310: 1, AR196: 1, AR174: 1, AR300: 1, AR240: 1, AR096: 1, AR231: 1, AR271: 1, AR201: 1, AR259: 1, AR177: 1, AR060: 1, |
| | | | | AR261: 1, AR237: 1, AR316: 1, AR179: 1, AR192: 1, AR262: 1, AR190: 1, AR234: 1, AR295: 1, AR285: 1, AR239: 1, AR258: 1, |
| | | | | AR299: 1, AR204: 1, AR233: 1, AR197: 1, AR211: 1, AR254: 1 H0553: 3, H0717: 2, H0486: 1, H0427: 1, H0081: 1, H0014: 1, |
| | | | | S0388: 1, H0112: 1, H0030: 1, H0031: 1, H0644: 1, H0488: 1, H0519: 1, L0759: 1, H0543: 1 and H0506: 1. |
| 48 | HDTDQ23 | 1306984 | 58 | AR200: 16, AR311: 15, AR272: 13, AR264: 12, AR165: 11, AR164: 11, AR188: 11, AR312: 10, AR166: 10, AR211: 10, AR104: 10, |
| | | | | AR282: 10, AR191: 10, AR246: 9, AR096: 9, AR210: 9, AR189: 9, AR162: 9, AR199: 9, AR161: 9, AR163: 9, AR274: 9, AR196: 9, |
| | | | | AR308: 8, AR174: 8, AR089: 8, AR240: 8, AR309: 7, AR175: 7, AR218: 7, AR219: 7, AR190: 7, AR295: 7, AR203: 7, AR316: 7, |
| | | | | AR299: 7, AR313: 6, AR285: 6, AR247: 6, AR185: 6, AR275: 6, AR263: 6, AR183: 6, AR245: 6, AR060: 6, AR181: 6, AR212: 6, |
| | | | | AR039: 6, AR053: 5, AR288: 5, AR269: 5, AR268: 5, AR243: 5, AR291: 5, AR290: 5, AR033: 5, AR173: 5, AR238: 5, AR267: 5, |
| | | | | AR231: 5, AR176: 5, AR271: 5, AR300: 4, AR237: 4, AR205: 4, AR266: 4, AR177: 4, AR182: 4, AR223: 4, AR270: 4, AR296: 4, |
| | | | | AR213: 4, AR277: 4, AR229: 4, AR178: 4, AR261: 4, AR171: 4, AR297: 3, AR195: 3, AR287: 3, AR239: 3, AR232: 3, AR230: 3, |
| | | | | AR255: 3, AR234: 3, AR226: 3, AR257: 3, AR286: 3, AR293: 3, AR258: 3, AR236: 3, AR193: 3, AR262: 3, AR168: 3, AR180: 3, |
| | | | | AR252: 3, AR289: 3, AR221: 3, AR225: 3, AR250: 3, AR179: 3, AR294: 3, AR216: 2, AR201: 2, AR198: 2, AR233: 2, AR061: 2, |
| | | | | AR172: 2, AR222: 2, AR055: 2, AR170: 2, AR215: 2, AR256: 2, AR228: 2, AR227: 2, AR224: 2, AR214: 1, AR283: 1, AR197: 1, |
| | | | | AR260: 1, AR235: 1, AR253: 1 L0659: 5, L0666: 4, L0665: 4, L2634: 3, L0471: 2, H0031: 2, L0646: 2, L0794: 2, L0766: 2, |
| | | | | L0657: 2, H0265: 1, H0685: 1, L0785: 1, S0356: 1, S0376: 1, S0360: 1, H0742: 2, S0007: 1, H0747: 1, H0486: 1, L2540: 1, H0069: 1, |
| | | | | H0025: 1, H0457: 1, H0252: 1, H0428: 1, L0055: 1, H0038: 1, S0344: 1, L0625: 1, L0761: 1, L0800: 1, L0553: 1, L0649: 1, L0803: 1, |
| | | | | L0650: 1, L0606: 1, L3872: 1, L0791: 1, L0663: 1, L0664: 1, H0684: 1, H0435: 1, H0648: 1, S0380: 1, L3832: 1, L0749: 1, L0786: 1, |
| | | | | L0780: 1, L0755: 1, L0759: 1, L0596: 1, L0601: 1, H0543: 1 and H0422: 1. |
| | HDTDQ23 | 879009 | 226 | |
| | HDTDQ23 | 751707 | 227 | |
| 49 | HE2DE47 | 619852 | 59 | AR224: 15, AR223: 15, AR217: 12, AR214: 12, AR222: 11, AR225: 11, AR172: 9, AR216: 9, AR215: 9, AR221: 8, AR171: 7, |
| | | | | AR162: 7, AR168: 7, AR161: 7, AR264: 7, AR196: 7, AR176: 6, AR163: 6, AR165: 6, AR263: 6, AR246: 6, AR164: 6, AR309: 6, |
| | | | | AR166: 6, AR193: 6, AR170: 6, AR313: 5, AR096: 5, AR089: 5, AR250: 5, AR169: 5, AR242: 5, AR312: 5, AR261: 5, AR254: 5, |
| | | | | AR295: 5, AR245: 5, AR180: 5, AR189: 5, AR271: 5, AR191: 5, AR291: 5, AR274: 5, AR177: 5, AR316: 4, AR178: 4, AR201: 4, |
| | | | | AR272: 4, AR253: 4, AR267: 4, AR308: 4, AR270: 4, AR282: 4, AR229: 4, AR174: 4, AR175: 4, AR188: 4, AR268: 4, AR190: 4, |
| | | | | AR288: 4, AR183: 4, AR060: 4, AR297: 4, AR181: 4, AR192: 4, AR173: 4, AR255: 4, AR195: 4, AR296: 4, AR179: 4, AR285: 4, |
| | | | | AR311: 4, AR199: 4, AR197: 4, AR205: 4, AR231: 4, AR237: 4, AR243: 4, AR239: 4, AR299: 4, AR300: 3, AR236: 3, AR182: 3, |
| | | | | AR257: 3, AR212: 3, AR269: 3, AR218: 3, AR290: 3, AR238: 3, AR275: 3, AR262: 3, AR203: 3, AR198: 3, AR266: 3, AR053: 3, |
| | | | | AR287: 3, AR210: 3, AR228: 3, AR293: 3, AR247: 3, AR213: 3, AR252: 3, AR240: 3, AR219: 3, AR185: 3, AR226: 3, AR200: 3, |
| | | | | AR235: 3, AR233: 3, AR204: 3, AR207: 3, AR258: 3, AR286: 3, AR039: 3, AR033: 2, AR260: 2, AR283: 2, AR232: 2, AR277: 2, |
| | | | | AR230: 2, AR294: 2, AR289: 2, AR061: 2, AR234: 2, AR055: 2, AR227: 2, AR256: 2, AR211: 2, AR104: 2 L0439: 10, L0747: 9, |
| | | | | L0766: 8, L0770: 5, L0666: 4, L0754: 4, L0777: 4, L0659: 3, L0783: 3, S0126: 3, H0543: 3, L0483: 2, H0264: 2, L0764: 2, L0662: 2, |
| | | | | L0768: 2, L0665: 2, L0438: 2, L0748: 2, L0756: 2, L0752: 2, L0755: 2, L0758: 2, L0759: 2, H0170: 1, T0049: 1, H0341: 1, S0029: 1, |
| | | | | H0661: 1, H0306: 1, S0408: 1, H0580: 1, S0045: 1, H0431: 1, H0455: 1, H0586: 1, L0622: 1, H0575: 1, H0004: 1, H0581: 1, |
| | | | | H0421: 1, H0263: 1, H0569: 1, H0015: 1, S0051: 1, S0003: 1, H0615: 1, L0142: 1, H0090: 1, H0625: 1, S0422: 1, L0598: 1, H0529: 1, |
| | | | | L0769: 1, L0667: 1, L0646: 1, L0774: 1, L0375: 1, L0657: 1, L0519: 1, L0664: 1, H0144: 1, S0374: 1, H0547: 1, H0435: 1, H0666: 1, |
| | | | | S0380: 1, H0521: 1, S0404: 1, H0555: 1, L0749: 1, L0750: 1, L0779: 1, L0592: 1, L0608: 1, S0026: 1 and H0542: 1. |
| | HE2DE47 | 382025 | 228 | |
| 50 | HE2NV57 | 740750 | 60 | AR235: 6, AR282: 4, AR309: 4, AR171: 4, AR270: 4, AR178: 3, AR272: 3, AR245: 3, AR269: 3, AR291: 3, AR169: 3, AR268: 3, |
| | | | | AR213: 3, AR215: 3, AR254: 3, AR267: 3, AR289: 3, AR274: 3, AR236: 3, AR175: 3, AR053: 3, AR228: 3, AR261: 3, AR242: 2, |
| | | | | AR161: 2, AR181: 2, AR308: 2, AR300: 2, AR257: 2, AR238: 2, AR182: 2, AR266: 2, AR204: 2, AR237: 2, AR170: 2, AR288: 2, |
| | | | | AR290: 2, AR188: 2, AR297: 2, AR168: 2, AR262: 2, AR162: 2, AR163: 2, AR296: 2, AR233: 2, AR210: 2, AR285: 2, AR295: 2, |
| | | | | AR264: 2, AR293: 2, AR165: 2, AR229: 2, AR201: 2, AR189: 2, AR250: 2, AR164: 2, AR221: 2, AR195: 2, AR222: 2, AR223: 2, |
| | | | | AR239: 2, AR231: 2, AR294: 2, AR166: 2, AR191: 2, AR179: 2, AR255: 2, AR271: 2, AR287: 2, AR212: 2, AR234: 2, AR299: 2, |
| | | | | AR225: 2, AR203: 2, AR246: 2, AR200: 2, AR205: 1, AR089: 1, AR173: 1, AR176: 1, AR240: 1, AR286: 1, AR193: 1, AR199: 1, |
| | | | | AR258: 1, AR196: 1, AR232: 1, AR096: 1, AR243: 1, AR312: 1, AR185: 1, AR061: 1, AR183: 1, AR230: 1, AR060: 1 S0414: 3, |
| | | | | L0805: 3, S0412: 3, H0457: 2, L0756: 2, H0170: 1, H0645: 1, H0455: 1, H0421: 1, H0100: 1, L0803: 1, S0052: 1, S0374: 1, H0696: 1 |
| | | | | and L0743: 1. |
| 51 | HE2PH36 | 570903 | 61 | AR263: 75, AR171: 60, AR309: 59, AR264: 59, AR252: 58, AR168: 57, AR223: 54, AR169: 49, AR308: 46, AR311: 44, AR214: 44, |
| | | | | AR053: 42, AR172: 38, AR312: 37, AR170: 37, AR225: 36, AR246: 36, AR212: 34, AR272: 33, AR217: 32, AR197: 32, AR245: 32, |
| | | | | AR222: 31, AR213: 30, AR207: 30, AR224: 30, AR198: 27, AR096: 27, AR196: 26, AR195: 26, AR313: 25, AR205: 25, AR216: 24, |
| | | | | AR201: 23, AR218: 22, AR215: 21, AR254: 21, AR235: 21, AR165: 20, AR261: 20, AR253: 20, AR274: 20, AR243: 20, AR221: 19, |
| | | | | AR164: 19, AR316: 19, AR275: 19, AR250: 19, AR192: 18, AR166: 18, AR161: 18, AR162: 18, AR177: 18, AR163: 18, AR271: 18, |
| | | | | AR174: 17, AR039: 17, AR200: 17, AR089: 17, AR240: 16, AR296: 16, AR219: 16, AR188: 16, AR193: 16, AR033: 15, AR295: 15, |
| | | | | AR185: 14, AR189: 14, AR229: 14, AR060: 14, AR299: 13, AR236: 13, AR203: 13, AR242: 13, AR183: 13, AR190: 13, AR210: 12, |
| | | | | AR104: 12, AR282: 12, AR178: 12, AR300: 12, AR181: 12, AR175: 12, AR268: 12, AR199: 12, AR226: 11, AR211: 11, AR191: 11, |
| | | | | AR269: 11, AR173: 11, AR204: 10, AR277: 10, AR270: 10, AR180: 10, AR297: 10, AR247: 10, AR288: 10, AR290: 9, AR179: 9, |
| | | | | AR285: 9, AR291: 9, AR176: 9, AR262: 9, AR239: 9, AR283: 9, AR238: 8, AR182: 8, AR267: 8, AR237: 8, AR055: 8, AR287: 8, |
| | | | | AR257: 8, AR289: 8, AR231: 7, AR293: 7, AR258: 7, AR255: 7, AR232: 7, AR286: 7, AR230: 7, AR234: 7, AR256: 7, AR266: 6, |
| | | | | AR233: 6, AR227: 6, AR294: 6, AR228: 5, AR260: 5, AR061: 4 H0171: 1, S0114: 1 and S0356: 1. |
| 52 | HE8DS15 | 847060 | 62 | AR180: 17, AR181: 15, AR178: 15, AR096: 14, AR182: 13, AR179: 13, AR246: 13, AR175: 13, AR191: 12, AR183: 12, AR190: 12, |
| | | | | AR240: 11, AR268: 10, AR270: 10, AR174: 10, AR269: 10, AR173: 9, AR243: 9, AR176: 9, AR060: 8, AR185: 7, AR255: 7, |
| | | | | AR189: 7, AR201: 7, AR192: 7, AR039: 7, AR193: 7, AR197: 7, AR257: 7, AR055: 6, AR295: 6, AR290: 6, AR296: 6, AR299: 6, |
| | | | | AR285: 6, AR288: 6, AR207: 5, AR291: 5, AR188: 5, AR254: 5, AR287: 5, AR297: 5, AR218: 5, AR294: 5, AR316: 5, AR235: 5, |
| | | | | AR293: 5, AR242: 4, AR264: 4, AR245: 4, AR089: 4, AR236: 4, AR177: 4, AR195: 4, AR161: 4, AR198: 4, AR271: 4, AR162: 4, |
| | | | | AR163: 4, AR204: 4, AR205: 4, AR165: 4, AR275: 4, AR196: 4, AR267: 4, AR262: 4, AR164: 4, AR260: 4, AR286: 3, AR261: 3, |
| | | | | AR300: 3, AR104: 3, AR289: 3, AR169: 3, AR313: 3, AR168: 3, AR033: 3, AR266: 3, AR238: 3, AR253: 3, AR247: 3, AR222: 3, |
| | | | | AR258: 3, AR233: 3, AR228: 3, AR200: 3, AR312: 3, AR166: 3, AR229: 2, AR224: 2, AR272: 2, AR199: 2, AR231: 2, AR250: 2, |
| | | | | AR203: 2, AR061: 2, AR263: 2, AR237: 2, AR053: 2, AR219: 2, AR226: 2, AR230: 2, AR282: 2, AR277: 2, AR221: 2, AR274: 2, |
| | | | | AR213: 2, AR283: 2, AR232: 2, AR217: 2, AR309: 2, AR227: 2, AR239: 2, AR214: 2, AR256: 2, AR234: 2, AR212: 2, AR308: 2, |
| | | | | AR171: 1, AR216: 1, AR225: 1, AR252: 1, AR170: 1 L0779: 8, L0770: 7, L0731: 7, L0662: 6, L0803: 5, L0599: 5, L0758: 4, |
| | | | | H0739: 3, H0624: 3, H0486: 3, H0615: 3, L0748: 3, L0750: 3, H0713: 2, S0222: 2, H0575: 2, H0050: 2, H0031: 2, H0553: 2, S0036: 2, |
| | | | | H0038: 2, S0422: 2, L0804: 2, L0774: 2, L0775: 2, L0647: 2, L0438: 2, L0742: 2, L0743: 2, L0747: 2, L0777: 2, L0605: 2, L0485: 2, |
| | | | | H0171: 1, H0717: 1, S0442: 1, H0208: 1, H0411: 1, H0586: 1, H0587: 1, L3655: 1, H0013: 1, H0156: 1, H0108: 1, H0581: 1, |
| | | | | S0049: 1, H0194: 1, H0572: 1, H0123: 1, L0471: 1, H0024: 1, H0373: 1, S0051: 1, S6028: 1, H0188: 1, H0644: 1, H0628: 1, H0383: 1, |
| | | | | H0316: 1, T0067: 1, L0768: 1, L0794: 1, L0375: 1, L0806: 1, L0659: 1, L0532; 1, L0665: 1, H0144: 1, H0691: 1, S0126: 1, H0660: 1, |
| | | | | H0648: 1, S0328: 1, S0378: 1, S0380: 1, H0436: 1, S0028: 1, L0749: 1, L0756: 1, L0759: 1, H0444: 1, S0242: 1 and H0352: 1. |
| 53 | HE9HY07 | 420063 | 63 | AR172: 5, AR201: 4, AR266: 4, AR170: 4, AR269: 4, AR182: 4, AR168: 4, AR039: 4, AR176: 4, AR228: 4, AR169: 4, AR236: 4, |
| | | | | AR254: 4, AR165: 4, AR257: 3, AR164: 3, AR233: 3, AR253: 3, AR191: 3, AR166: 3, AR183: 3, AR181: 3, AR229: 3, AR264: 3, |
| | | | | AR268: 3, AR178: 3, AR231: 3, AR237: 3, AR270: 3, AR180: 3, AR283: 3, AR179: 3, AR053: 3, AR197: 3, AR190: 3, AR096: 3, |
| | | | | AR060: 3, AR239: 3, AR055: 3, AR177: 3, AR238: 3, AR255: 3, AR193: 3, AR312: 3, AR061: 3, AR250: 3, AR235: 3, AR267: 3, |
| | | | | AR230: 3, AR185: 3, AR288: 2, AR175: 2, AR293: 2, AR196: 2, AR262: 2, AR246: 2, AR316: 2, AR287: 2, AR033: 2, AR294: 2, |
| | | | | AR089: 2, AR247: 2, AR313: 2, AR173: 2, AR243: 2, AR300: 2, AR234: 2, AR271: 2, AR290: 2, AR199: 2, AR297: 2, AR277: 2, |
| | | | | AR286: 2, AR224: 2, AR223: 2, AR309: 2, AR289: 2, AR200: 2, AR174: 2, AR296: 2, AR232: 2, AR163: 2, AR226: 2, AR211: 2, |
| | | | | AR285: 2, AR222: 2, AR299: 2, AR261: 2, AR189: 2, AR205: 2, AR162: 2, AR203: 2, AR295: 2, AR240: 2, AR227: 2, AR171: 2, |
| | | | | AR260: 1, AR214: 1, AR216: 1, AR311: 1, AR212: 1, AR188: 1, AR219: 1, AR291: 1, AR221: 1, AR272: 1, AR308: 1, AR161: 1, |
| | | | | AR245: 1 H0615: 1 and H0144: 1. |
| 54 | HEOMQ63 | 603533 | 64 | AR039: 7, AR221: 4, AR271: 4, AR309: 3, AR283: 3, AR252: 3, AR171: 3, AR162: 3, AR180: 3, AR163: 3, AR243: 3, AR217: 3, |
| | | | | AR161: 3, AR176: 3, AR165: 3, AR213: 3, AR282: 3, AR164: 3, AR291: 3, AR296: 3, AR245: 2, AR235: 2, AR089: 2, AR263: 2, |
| | | | | AR231: 2, AR246: 2, AR297: 2, AR313: 2, AR224: 2, AR172: 2, AR195: 2, AR174: 2, AR286: 2, AR168: 2, AR060: 2, AR289: 2, |
| | | | | AR201: 2, AR294: 2, AR177: 2, AR300: 2, AR225: 2, AR211: 2, AR179: 2, AR229: 1, AR240: 1, AR205: 1, AR239: 1, AR285: 1, |
| | | | | AR299: 1, AR257: 1, AR264: 1, AR212: 1, AR166: 1, AR316: 1, AR287: 1, AR227: 1, AR247: 1, AR270: 1, AR170: 1, AR216: 1, |
| | | | | AR096: 1, AR237: 1, AR104: 1 L0766: 3, L0777: 2, S0116: 1, S0376: 1, H0457: 1, S0440: 1, L0771: 1, L0803: 1, L0804: 1, |
| | | | | L0657: 1, L0659: 1, H0525: 1, S0406: 1 and L0750: 1. |
| 55 | HEPAB80 | 1307790 | 65 | AR191: 117, AR190: 89, AR245: 79, AR271: 76, AR175: 71, AR178: 66, AR189: 63, AR240: 60, AR246: 60, AR269: 58, |
| | | | | AR174: 58, AR188: 56, AR196: 55, AR180: 54, AR197: 54, AR176: 53, AR183: 53, AR211: 52, AR274: 50, AR182: 47, AR177: 47, |
| | | | | AR207: 45, AR192: 44, AR235: 44, AR270: 44, AR179: 43, AR181: 41, AR268: 41, AR312: 40, AR264: 40, AR261: 39, AR165: 39, |
| | | | | AR166: 39, AR263: 38, AR250: 38, AR164: 37, AR290: 37, AR252: 37, AR266: 35, AR200: 34, AR291: 34, AR210: 34, AR285: 33, |
| | | | | AR255: 32, AR243: 32, AR295: 31, AR247: 30, AR254: 29, AR308: 28, AR236: 28, AR275: 28, AR201: 28, AR173: 28, AR033: 27, |
| | | | | AR163: 26, AR267: 26, AR238: 26, AR195: 25, AR198: 25, AR253: 25, AR287: 25, AR193: 25, AR161: 24, AR260: 24, AR311: 24, |
| | | | | AR288: 23, AR297: 23, AR162: 21, AR205: 21, AR294: 21, AR239: 20, AR256: 20, AR313: 20, AR289: 20, AR096: 20, AR060: 20, |
| | | | | AR262: 19, AR300: 18, AR258: 18, AR185: 18, AR226: 17, AR272: 17, AR257: 17, AR219: 17, AR232: 16, AR039: 16, AR316: 16, |
| | | | | AR293: 15, AR237: 15, AR296: 15, AR309: 15, AR282: 14, AR234: 14, AR224: 14, AR231: 13, AR053: 13, AR233: 13, AR203: 13, |
| | | | | AR229: 13, AR286: 12, AR299: 12, AR199: 12, AR172: 11, AR222: 11, AR221: 11, AR212: 11, AR061: 11, AR089: 11, AR277: 10, |
| | | | | AR169: 10, AR230: 10, AR242: 10, AR104: 10, AR223: 10, AR213: 9, AR228: 9, AR168: 9, AR218: 9, AR170: 8, AR204: 8, |
| | | | | AR225: 8, AR227: 7, AR216: 6, AR214: 6, AR055: 5, AR171: 5, AR283: 5, AR215: 3, AR217: 2 H0150: 1 |
| | HEPAB80 | 570048 | 229 | |
| 56 | HFABH95 | 566712 | 66 | AR173: 16, AR162: 14, AR161: 14, AR163: 13, AR180: 12, AR178: 11, AR257: 11, AR262: 11, AR191: 11, AR196: 10, AR181: 10, |
| | | | | AR226: 10, AR174: 10, AR297: 10, AR255: 9, AR165: 9, AR238: 9, AR313: 9, AR287: 8, AR164: 8, AR199: 8, AR258: 8, |
| | | | | AR166: 8, AR176: 8, AR240: 8, AR236: 8, AR179: 8, AR183: 8, AR261: 8, AR264: 7, AR288: 7, AR260: 7, AR225: 7, AR182: 7, |
| | | | | AR242: 7, AR230: 7, AR200: 7, AR089: 7, AR229: 7, AR247: 7, AR203: 7, AR189: 7, AR227: 7, AR234: 6, AR188: 6, AR061: 6, |
| | | | | AR237: 6, AR231: 6, AR175: 6, AR228: 6, AR269: 6, AR270: 6, AR233: 6, AR300: 6, AR296: 6, AR299: 6, AR221: 5, AR254: 5, |
| | | | | AR239: 5, AR293: 5, AR060: 5, AR193: 5, AR223: 5, AR185: 5, AR190: 5, AR217: 5, AR232: 5, AR171: 5, AR215: 5, AR245: 5, |
| | | | | AR212: 5, AR216: 5, AR274: 5, AR294: 5, AR290: 5, AR282: 4, AR291: 4, AR266: 4, AR316: 4, AR169: 4, AR268: 4, AR204: 4, |
| | | | | AR285: 4, AR267: 4, AR218: 4, AR210: 4, AR096: 4, AR177: 4, AR311: 4, AR246: 4, AR184: 4, AR277: 4, AR170: 4, AR286: 4, |
| | | | | AR272: 4, AR192: 4, AR033: 4, AR235: 4, AR312: 4, AR308: 4, AR275: 3, AR263: 3, AR053: 3, AR214: 3, AR253: 3, AR309: 3, |
| | | | | AR172: 3, AR202: 3, AR201: 3, AR168: 3, AR197: 3, AR211: 3, AR224: 3, AR289: 3, AR198: 3, AR213: 3, AR219: 3, AR195: 3, |
| | | | | AR052: 3, AR104: 3, AR207: 3, AR295: 2, AR256: 2, AR222: 2, AR205: 2, AR271: 2, AR039: 2, AR186: 2, AR243: 2, AR283: 2, |
| | | | | AR055: 2, AR273: 2, AR206: 1, AR244: 1, AR252: 1 S6024: 1, S0430: 1, H0039: 1, H0056: 1 and H0660: 1. |
| 57 | HFAEF57 | 534142 | 67 | AR241: 14, AR161: 14, AR162: 13, AR163: 13, AR313: 10, AR242: 10, AR201: 10, AR165: 9, AR164: 9, AR252: 9, AR197: 9, |
| | | | | AR194: 9, AR053: 9, AR166: 9, AR198: 8, AR245: 8, AR236: 8, AR192: 8, AR176: 8, AR206: 8, AR250: 8, AR212: 8, AR235: 8, |
| | | | | AR196: 7, AR271: 7, AR186: 7, AR052: 7, AR173: 7, AR204: 7, AR246: 7, AR253: 7, AR263: 7, AR207: 7, AR191: 7, AR275: 7, |
| | | | | AR180: 7, AR226: 7, AR272: 7, AR247: 7, AR181: 6, AR299: 6, AR089: 6, AR195: 6, AR293: 6, AR244: 6, AR193: 6, AR312: 6, |
| | | | | AR213: 6, AR229: 6, AR039: 6, AR280: 6, AR251: 6, AR188: 6, AR202: 6, AR309: 6, AR287: 6, AR264: 6, AR238: 6, AR273: 6, |
| | | | | AR174: 6, AR177: 6, AR240: 6, AR257: 6, AR237: 5, AR243: 5, AR061: 5, AR233: 5, AR228: 5, AR261: 5, AR184: 5, AR182: 5, |
| | | | | AR262: 5, AR185: 5, AR300: 5, AR270: 5, AR096: 5, AR189: 5, AR190: 5, AR274: 5, AR248: 5, AR205: 5, AR315: 5, AR183: 5, |
| | | | | AR175: 5, AR288: 5, AR169: 5, AR033: 5, AR297: 5, AR269: 5, AR199: 5, AR178: 5, AR249: 5, AR295: 5, AR308: 4, AR055: 4, |
| | | | | AR223: 4, AR254: 4, AR060: 4, AR104: 4, AR216: 4, AR296: 4, AR227: 4, AR290: 4, AR221: 4, AR266: 4, AR232: 4, AR239: 4, |
| | | | | AR311: 4, AR179: 4, AR298: 4, AR200: 4, AR231: 4, AR285: 4, AR255: 4, AR268: 4, AR286: 4, AR267: 4, AR282: 4, AR230: 4, |
| | | | | AR294: 4, AR316: 4, AR214: 4, AR234: 4, AR168: 4, AR277: 3, AR258: 3, AR291: 3, AR170: 3, AR217: 3, AR203: 3, AR292: 3, |
| | | | | AR171: 3, AR289: 3, AR310: 3, AR265: 3, AR215: 3, AR259: 3, AR284: 3, AR225: 2, AR281: 2, AR219: 2, AR218: 2, AR283: 2, |
| | | | | AR222: 2, AR314: 2, AR260: 2, AR210: 2, AR172: 2, AR224: 2, AR211: 1, AR256: 1 S6024: 1 |
| 58 | HFCEB37 | 411345 | 68 | AR282: 18, AR176: 14, AR269: 13, AR183: 11, AR173: 11, AR201: 11, AR182: 11, AR252: 11, AR204: 11, AR193: 11, AR294: 10, |
| | | | | AR243: 9, AR233: 9, AR236: 9, AR197: 9, AR162: 9, AR161: 9, AR270: 9, AR163: 9, AR178: 9, AR165: 9, AR217: 9, AR225: 9, |
| | | | | AR175: 9, AR231: 9, AR181: 9, AR089: 8, AR215: 8, AR164: 8, AR207: 8, AR170: 8, AR216: 8, AR166: 8, AR172: 8, AR268: 8, |
| | | | | AR221: 8, AR291: 8, AR169: 8, AR179: 8, AR261: 8, AR235: 8, AR205: 8, AR224: 8, AR039: 7, AR180: 7, AR060: 7, AR242: 7, |
| | | | | AR267: 7, AR228: 7, AR168: 7, AR223: 7, AR290: 7, AR198: 7, AR296: 7, AR266: 7, AR285: 7, AR287: 7, AR316: 7, AR174: 7, |
| | | | | AR257: 7, AR237: 7, AR271: 7, AR245: 7, AR313: 7, AR033: 7, AR229: 7, AR192: 7, AR255: 7, AR250: 7, AR288: 7, AR191: 6, |
| | | | | AR254: 6, AR096: 6, AR177: 6, AR055: 6, AR195: 6, AR246: 6, AR238: 6, AR222: 6, AR240: 6, AR239: 6, AR262: 6, AR293: 6, |
| | | | | AR247: 6, AR300: 6, AR289: 6, AR264: 6, AR214: 6, AR299: 6, AR188: 6, AR297: 6, AR190: 6, AR171: 6, AR253: 6, AR200: 6, |
| | | | | AR295: 5, AR053: 5, AR185: 5, AR226: 5, AR196: 5, AR309: 5, AR274: 5, AR312: 5, AR234: 5, AR189: 5, AR286: 5, AR061: 4, |
| | | | | AR308: 4, AR227: 4, AR275: 4, AR104: 4, AR263: 4, AR258: 4, AR218: 4, AR203: 4, AR232: 4, AR272: 4, AR230: 4, AR277: 4, |
| | | | | AR256: 4, AR212: 3, AR199: 3, AR210: 3, AR211: 3, AR311: 3, AR283: 3, AR219: 3, AR213: 3, AR260: 2 S0222: 2, L0438: 2, |
| | | | | S0134: 1, S0045: 1, H0747: 1, H0013: 1, H0009: 1, S6028: 1, L0598: 1, L0532: 1, S0052: 1, H0696: 1, S0146: 1, L0439: 1, L0777: 1 |
| | | | | and L0366: 1. |
| 59 | HFFAD59 | 520369 | 69 | AR225: 3, AR162: 3, AR161: 3, AR271: 3, AR183: 2, AR180: 2, AR282: 2, AR217: 2, AR254: 2, AR198: 2, AR291: 2, AR175: 2, |
| | | | | AR288: 2, AR177: 2, AR201: 2, AR163: 2, AR267: 2, AR224: 2, AR295: 2, AR266: 2, AR312: 2, AR173: 2, AR277: 2, AR311: 2, |
| | | | | AR238: 2, AR033: 2, AR193: 2, AR228: 2, AR294: 2, AR195: 2, AR275: 1, AR243: 1, AR272: 1, AR205: 1, AR174: 1, AR213: 1, |
| | | | | AR293: 1, AR308: 1, AR229: 1, AR233: 1, AR285: 1, AR247: 1, AR269: 1, AR181: 1, AR182: 1, AR230: 1, AR296: 1, AR185: 1, |
| | | | | AR240: 1, AR297: 1, AR258: 1 H0172: 2 |
| 60 | HFGAD82 | 513669 | 70 | AR104: 18, AR033: 14, AR222: 7, AR162: 6, AR161: 6, AR163: 6, AR309: 6, AR207: 5, AR224: 5, AR282: 5, AR178: 4, AR053: 4, |
| | | | | AR274: 4, AR089: 4, AR195: 4, AR272: 4, AR165: 4, AR289: 3, AR164: 3, AR166: 3, AR308: 3, AR246: 3, AR312: 3, AR183: 3, |
| | | | | AR223: 3, AR197: 3, AR192: 3, AR252: 3, AR277: 3, AR261: 3, AR039: 3, AR245: 3, AR176: 3, AR096: 3, AR170: 3, AR296: 3, |
| | | | | AR168: 2, AR266: 2, AR180: 2, AR299: 2, AR201: 2, AR060: 2, AR311: 2, AR316: 2, AR264: 2, AR285: 2, AR287: 2, AR270: 2, |
| | | | | AR294: 2, AR271: 2, AR288: 2, AR225: 2, AR293: 2, AR290: 2, AR171: 2, AR286: 2, AR291: 2, AR295: 2, AR216: 2, AR297: 2, |
| | | | | AR275: 2, AR247: 2, AR191: 2, AR185: 2, AR229: 2, AR205: 2, AR300: 2, AR257: 2, AR283: 2, AR269: 2, AR182: 2, AR061: 1, |
| | | | | AR193: 1, AR213: 1, AR236: 1, AR237: 1, AR313: 1, AR217: 1, AR268: 1, AR175: 1, AR179: 1, AR233: 1 L0439: 22, L0756: 12, |
| | | | | S0222: 11, L0438: 10, S0414: 8, S0051: 8, L0598: 7, S0412: 6, L3657: 5, L0770: 5, H0144: 5, L0638: 4, H0170: 3, S0282: 3, |
| | | | | H0438: 3, S0036: 3, L0740: 3, S0031: 3, S0260: 3, S0007: 2, H0441: 2, L3655: 2, S0049: 2, H0052: 2, H0178: 2, H0051: 2, S6028: 2, |
| | | | | H0038: 2, L0759: 2, L0589: 2, L0366: 2, H0583: 1, S0001: 1, H0662: 1, L3658: 1, L0476: 1, S0300: 1, H0406: 1, S6014: 1, H0455: 1, |
| | | | | H0013: 1, H0244: 1, H0390: 1, S0346: 1, H0327: 1, H0041: 1, H0563: 1, H0567: 1, S0050: 1, S0048: 1, S0388: 1, S0039: 1, L0796: 1, |
| | | | | L5575: 1, L0630: 1, L0767: 1, L0794: 1, L0774: 1, L0805: 1, L0776: 1, L0518: 1, L0809: 1, L0788: 1, L0792: 1, L0666: 1, S0374: 1, |
| | | | | H0658: 1, S0330: 1, L0777: 1, L0758: 1, L0592: 1 and L0593: 1. |
| 61 | HFIUR10 | 532060 | 71 | AR169: 4, AR165: 4, AR161: 3, AR163: 3, AR215: 3, AR162: 3, AR166: 3, AR246: 3, AR252: 3, AR313: 3, AR089: 3, AR311: 3, |
| | | | | AR266: 2, AR270: 2, AR180: 2, AR261: 2, AR164: 2, AR224: 2, AR269: 2, AR096: 2, AR236: 2, AR289: 2, AR201: 2, AR297: 2, |
| | | | | AR312: 2, AR205: 2, AR217: 2, AR255: 2, AR172: 2, AR240: 2, AR216: 2, AR183: 2, AR309: 2, AR173: 2, AR291: 2, AR176: 2, |
| | | | | AR196: 2, AR295: 1, AR264: 1, AR225: 1, AR299: 1, AR033: 1, AR174: 1, AR257: 1, AR282: 1, AR060: 1, AR230: 1, AR178: 1, |
| | | | | AR177: 1, AR316: 1, AR168: 1, AR243: 1, AR283: 1, AR268: 1, AR277: 1, AR189: 1, AR290: 1, AR247: 1, AR055: 1, AR308: 1, |
| | | | | AR288: 1, AR300: 1, AR237: 1, AR185: 1 H0265: 2, L0591: 2, H0556: 1, S0356: 1, H0271: 1, H0622: 1, S0428: 1, S0434: 1 and |
| | | | | S0196: 1. |
| 62 | HFTBM50 | 545012 | 72 | AR300: 4, AR104: 4, AR240: 4, AR277: 3, AR060: 3, AR185: 3, AR055: 3, AR299: 2, AR316: 2, AR282: 2, AR219: 2, AR089: 2, |
| | | | | AR283: 2, AR218: 2, AR096: 2, AR039: 2, AR313: 1 L0439: 6, L0731: 4, L0769: 2, L0666: 2, S0432: 2, S0206: 2, L0751: 2, |
| | | | | L0777: 2, L0759: 2, L0591: 2, H0341: 1, H0661: 1, S0408: 1, H0601: 1, H0497: 1, H0123: 1, L0471: 1, H0051: 1, H0252: 1, H0673: 1, |
| | | | | H0616: 1, H0551: 1, H0646: 1, S0422: 1, L0372: 1, L0771: 1, L0773: 1, L0768: 1, L0775: 1, L0375: 1, L0527: 1, L0664: 1, L0665: 1, |
| | | | | S0374: 1, H0519: 1, H0659: 1, H0521: 1, H0522: 1, L0747: 1, L0749: 1, L0755: 1, L0758: 1, S0031: 1, L0683: 1, L0590: 1 and |
| | | | | L0595: 1. |
| 63 | HFTDZ36 | 545726 | 73 | AR282: 5, AR176: 3, AR252: 2, AR270: 2, AR287: 2, AR309: 2, AR221: 2, AR263: 2, AR291: 2, AR224: 2, AR233: 2, AR181: 2, |
| | | | | AR198: 2, AR240: 2, AR222: 2, AR193: 2, AR214: 2, AR286: 2, AR165: 2, AR164: 1, AR178: 1, AR236: 1, AR201: 1, AR168: 1, |
| | | | | AR089: 1, AR262: 1, AR060: 1, AR217: 1, AR161: 1, AR272: 1, AR264: 1, AR061: 1, AR195: 1, AR257: 1, AR268: 1, AR215: 1, |
| | | | | AR285: 1, AR258: 1, AR210: 1, AR104: 1, AR196: 1 L0779: 5, L0758: 4, S0036: 2, H0038: 2, S0422: 2, L0662: 2, L0803: 2, |
| | | | | H0171: 1, H0208: 1, H0411: 1, S0222: 1, H0013: 1, H0108: 1, H0581: 1, H0123: 1, H0024: 1, H0373: 1, S0051: 1, S6028: 1, |
| | | | | H0615: 1, L0794: 1, L0804: 1, S0126: 1, H0436: 1, S0028: 1, L0756: 1, L0777: 1, L0731: 1 and S0242: 1. |
| 64 | HFXBL33 | 778070 | 74 | AR163: 25, AR161: 24, AR162: 24, AR313: 23, AR173: 17, AR180: 17, AR196: 17, AR165: 17, AR166: 16, AR229: 16, AR164: 16, |
| | | | | AR270: 14, AR247: 14, AR182: 14, AR238: 14, AR234: 14, AR175: 14, AR179: 13, AR269: 13, AR181: 13, AR178: 13, AR199: 12, |
| | | | | AR258: 12, AR262: 12, AR240: 11, AR233: 11, AR257: 11, AR183: 11, AR264: 11, AR300: 10, AR268: 10, AR285: 10, AR293: 10, |
| | | | | AR274: 10, AR231: 10, AR275: 10, AR191: 10, AR230: 10, AR228: 10, AR236: 10, AR237: 10, AR226: 10, AR239: 9, AR287: 9, |
| | | | | AR203: 9, AR294: 9, AR174: 9, AR296: 9, AR260: 8, AR176: 8, AR189: 8, AR200: 8, AR312: 8, AR033: 8, AR096: 8, AR185: 8, |
| | | | | AR299: 8, AR255: 7, AR297: 7, AR267: 7, AR188: 7, AR177: 7, AR290: 7, AR277: 6, AR218: 6, AR190: 6, AR286: 6, AR291: 6, |
| | | | | AR089: 6, AR266: 6, AR060: 6, AR227: 6, AR219: 6, AR263: 5, AR295: 5, AR316: 5, AR311: 5, AR261: 5, AR055: 5, AR235: 5, |
| | | | | AR309: 5, AR282: 5, AR272: 4, AR288: 4, AR308: 4, AR256: 4, AR053: 4, AR289: 4, AR104: 4, AR283: 4, AR215: 4, AR223: 4, |
| | | | | AR232: 4, AR212: 4, AR213: 3, AR061: 3, AR211: 3, AR217: 3, AR216: 3, AR169: 3, AR210: 3, AR195: 3, AR168: 2, AR225: 2, |
| | | | | AR201: 2, AR193: 2, AR171: 2, AR214: 2, AR039: 2, AR243: 2, AR222: 2, AR170: 1, AR246: 1, AR224: 1 H0657: 3, H0645: 2, |
| | | | | L0748: 2, H0542: 2, H0583: 1, H0650: 1, S0001: 1, L0586: 1, H0013: 1, L0021: 1, T0071: 1, H0354: 1, H0179: 1, T0006: 1, H0591: 1, |
| | | | | H0272: 1, L0667: 1, H0547: 1, H0521: 1, S0404: 1, S0031: 1 and L0599: 1. |
| 65 | HFXJX44 | 701988 | 75 | AR313: 13, AR162: 11, AR161: 10, AR178: 10, AR163: 10, AR176: 10, AR183: 10, AR165: 9, AR089: 9, AR181: 9, AR182: 9, |
| | | | | AR164: 9, AR229: 9, AR166: 8, AR269: 8, AR173: 8, AR196: 8, AR055: 8, AR300: 8, AR228: 8, AR175: 7, AR233: 7, AR226: 7, |
| | | | | AR309: 7, AR247: 7, AR192: 7, AR239: 7, AR180: 7, AR236: 7, AR257: 7, AR293: 7, AR266: 7, AR235: 7, AR240: 7, AR238: 7, |
| | | | | AR267: 7, AR096: 7, AR177: 7, AR261: 6, AR053: 6, AR179: 6, AR245: 6, AR268: 6, AR282: 6, AR299: 6, AR198: 6, AR290: 6, |
| | | | | AR204: 6, AR191: 6, AR060: 6, AR262: 6, AR174: 6, AR277: 6, AR312: 6, AR271: 6, AR185: 5, AR316: 5, AR289: 5, AR270: 5, |
| | | | | AR294: 5, AR193: 5, AR201: 5, AR258: 5, AR296: 5, AR212: 5, AR237: 5, AR255: 5, AR227: 5, AR234: 5, AR061: 5, AR274: 5, |
| | | | | AR275: 5, AR264: 5, AR197: 5, AR287: 5, AR243: 5, AR297: 5, AR286: 4, AR263: 4, AR199: 4, AR200: 4, AR231: 4, AR203: 4 |
| | | | | AR291: 4, AR214: 4, AR242: 4, AR285: 4, AR230: 4, AR033: 4, AR189: 4, AR213: 4, AR188: 4, AR195: 4, AR288: 4, AR246: 4 |
| | | | | AR295: 4, AR224: 4, AR252: 3, AR104: 3, AR250: 3, AR272: 3, AR218: 3, AR219: 3, AR190: 3, AR308: 3, AR222: 3, AR171: 3, |
| | | | | AR260: 3, AR207: 3, AR168: 3, AR205: 3, AR283: 3, AR232: 3, AR039: 3, AR311: 2, AR172: 2, AR256: 2, AR221: 2, AR225: 2, |
| | | | | AR217: 2, AR169: 1, AR210: 1, AR211: 1, AR254: 1 H0590: 2, S0282: 1, H0486: 1, H0421: 1 and H0594: 1. |
| 66 | HFXKT05 | 658690 | 76 | AR207: 65, AR197: 54, AR193: 47, AR192: 45, AR201: 42, AR033: 40, AR299: 40, AR055: 39, AR242: 38, AR235: 38, AR177: 38, |
| | | | | AR233: 37, AR198: 35, AR185: 33, AR060: 33, AR195: 32, AR174: 31, AR203: 31, AR191: 31, AR204: 31, AR061: 30, AR104: 30, |
| | | | | AR181: 30, AR243: 29, AR179: 29, AR257: 28, AR165: 28, AR196: 28, AR176: 28, AR190: 28, AR089: 27, AR175: 27, AR213: 27, |
| | | | | AR291: 27, AR164: 27, AR228: 27, AR288: 27, AR287: 26, AR275: 26, AR161: 26, AR166: 26, AR238: 26, AR236: 26, AR163: 26, |
| | | | | AR199: 25, AR178: 25, AR245: 24, AR162: 24, AR267: 24, AR226: 23, AR039: 23, AR246: 23, AR261: 23, AR205: 23, AR173: 23, |
| | | | | AR286: 22, AR250: 22, AR240: 22, AR296: 22, AR316: 22, AR247: 21, AR293: 21, AR232: 21, AR231: 21, AR188: 21, AR294: 21, |
| | | | | AR053: 20, AR255: 20, AR289: 20, AR282: 20, AR189: 20, AR212: 20, AR300: 20, AR230: 20, AR295: 19, AR239: 19, AR270: 19, |
| | | | | AR258: 19, AR234: 19, AR308: 19, AR269: 18, AR180: 18, AR253: 18, AR285: 17, AR227: 17, AR297: 17, AR254: 17, AR272: 17, |
| | | | | AR237: 17, AR200: 16, AR182: 16, AR271: 16, AR262: 16, AR277: 16, AR312: 15, AR229: 15, AR260: 15, AR263: 15, AR274: 14, |
| | | | | AR268: 13, AR266: 13, AR309: 13, AR096: 13, AR290: 13, AR264: 12, AR183: 12, AR252: 11, AR313: 10, AR311: 10, AR256: 9, |
| | | | | AR225: 9, AR283: 9, AR211: 7, AR172: 7, AR210: 7, AR223: 7, AR224: 7, AR171: 6, AR217: 6, AR221: 6, AR216: 5, AR219: 5, |
| | | | | AR170: 5, AR215: 5, AR222: 4, AR214: 4, AR168: 3, AR218: 3, AR169: 3 L2804: 16, L2400: 15, L0748: 8, L3019: 5, L3316: 3, |
| | | | | L2138: 3, H0553: 2, L3140: 2, L3904: 2, S0378: 2, L0777: 2, L0758: 2, H0657: 1, S0282: 1, H0402: 1, L0005: 1, H0333: 1, T0114: 1, |
| | | | | S0280: 1, H0618: 1, H0253: 1, H0581: 1, H0052: 1, H0050: 1, H0620: 1, S0388: 1, H0354: 1, H0135: 1, S0344: 1, L0763: 1, L0638: 1, |
| | | | | L0761: 1, L0764: 1, L0363: 1, L0766: 1, L0651: 1, L0805: 1, L0655: 1, L0659: 1, L0666: 1, L2261: 1, H0701: 1, L0749: 1, L0756: 1, |
| | | | | L0779: 1, L0752: 1, L0599: 1, H0542: 1, H0423: 1, H0422: 1 and H0506: 1. |
| 67 | HGBHI35 | 570262 | 77 | AR089: 24, AR226: 21, AR299: 20, AR164: 20, AR165: 20, AR060: 19, AR166: 17, AR185: 16, AR201: 16, AR163: 15, AR161: 15, |
| | | | | AR162: 15, AR232: 15, AR096: 14, AR188: 14, AR237: 14, AR039: 14, AR227: 14, AR233: 13, AR238: 13, AR275: 12, AR193: 12, |
| | | | | AR191: 12, AR055: 12, AR173: 11, AR246: 11, AR183: 11, AR240: 11, AR228: 11, AR196: 11, AR316: 11, AR313: 11, AR189: 10, |
| | | | | AR239: 10, AR061: 10, AR175: 10, AR258: 10, AR199: 10, AR176: 10, AR180: 10, AR197: 9, AR190: 9, AR174: 9, AR283: 9, |
| | | | | AR270: 9, AR266: 9, AR245: 9, AR203: 9, AR231: 9, AR195: 9, AR300: 8, AR257: 8, AR269: 8, AR169: 8, AR178: 8, AR242: 8, |
| | | | | AR182: 8, AR277: 8, AR234: 8, AR192: 8, AR236: 8, AR235: 8, AR297: 8, AR291: 8, AR198: 8, AR181: 8, AR282: 8, AR295: 8, |
| | | | | AR264: 8, AR218: 8, AR274: 7, AR294: 7, AR217: 7, AR177: 7, AR285: 7, AR247: 7, AR271: 7, AR263: 7, AR288: 7, AR104: 7, |
| | | | | AR219: 7, AR229: 7, AR261: 7, AR215: 7, AR216: 6, AR287: 6, AR286: 6, AR255: 6, AR179: 6, AR268: 6, AR243: 6, AR262: 6, |
| | | | | AR205: 6, AR289: 6, AR293: 6, AR223: 6, AR267: 5, AR200: 5, AR312: 5, AR254: 5, AR290: 5, AR260: 5, AR308: 5, AR311: 5, |
| | | | | AR309: 5, AR204: 5, AR230: 5, AR296: 4, AR213: 4, AR225: 4, AR170: 4, AR272: 4, AR252: 4, AR256: 4, AR214: 4, AR222: 3, |
| | | | | AR207: 3, AR053: 3, AR211: 3, AR172: 3, AR210: 3, AR033: 2, AR212: 2, AR224: 2, AR171: 2, AR168: 2, L0748: 9, L0766: 6, |
| | | | | L0665: 6, L0751: 6, H0550: 5, S0358: 4, L0774: 4, L0758: 4, L0581: 4, H0135: 3, L0662: 3, L0775: 3, L0776: 3, L0743: 3, L0747: 3, |
| | | | | L0749: 3, L0777: 3, L0600: 3, H0295: 2, H0722: 2, H0052: 2, H0014: 2, H0510: 2, L0640: 2, L0659: 2, L0526: 2, L0809: 2, H0696: 2, |
| | | | | L0753: 2, S0134: 1, S0212: 1, S0376: 1, S0408: 1, H0742: 1, H0730: 1, H0747: 1, H0549: 1, H0331: 1, H0486: 1, H0575: 1, S0049: 1, |
| | | | | H0085: 1, H0204: 1, H0057: 1, S0051: 1, H0266: 1, H0188: 1, H0687: 1, H0169: 1, H0090: 1, H0591: 1, T0067: 1, H0488: 1, |
| | | | | H0714: 1, S0438: 1, L0374: 1, L0648: 1, L0376: 1, L0807: 1, L5622: 1, L0790: 1, L0791: 1, L0666: 1, H0701: 1, H0547: 1, S0126: 1, |
| | | | | H0660: 1, H0672: 1, H0539: 1, H0436: 1, L0439: 1, L0746: 1, L0750: 1, L0779: 1, L0752: 1, L0759: 1 and S0436: 1. |
| 68 | HGLAF75 | 566838 | 78 | AR196: 8, AR191: 7, AR269: 7, AR215: 7, AR180: 6, AR188: 6, AR270: 6, AR223: 6, AR173: 6, AR198: 5, AR176: 5, AR178: 5, |
| | | | | AR268: 5, AR055: 5, AR165: 5, AR175: 5, AR181: 5, AR266: 5, AR161: 5, AR162: 5, AR264: 5, AR183: 5, AR060: 5, AR174: 5, |
| | | | | AR164: 5, AR291: 5, AR163: 5, AR172: 5, AR182: 5, AR189: 5, AR201: 5, AR166: 5, AR261: 5, AR089: 5, AR313: 5, AR193: 5, |
| | | | | AR177: 4, AR246: 4, AR255: 4, AR216: 4, AR285: 4, AR179: 4, AR257: 4, AR217: 4, AR170: 4, AR221: 4, AR290: 4, AR299: 4, |
| | | | | AR252: 4, AR200: 4, AR267: 4, AR262: 4, AR235: 4, AR185: 4, AR240: 4, AR238: 4, AR233: 4, AR295: 4, AR316: 4, AR168: 4, |
| | | | | AR190: 4, AR218: 4, AR271: 4, AR236: 4, AR296: 4, AR096: 4, AR287: 4, AR199: 4, AR293: 4, AR272: 4, AR242: 4, AR297: 4, |
| | | | | AR243: 4, AR294: 4, AR195: 4, AR300: 4, AR169: 3, AR224: 3, AR253: 3, AR282: 3, AR203: 3, AR239: 3, AR033: 3, AR288: 3, |
| | | | | AR309: 3, AR171: 3, AR222: 3, AR211: 3, AR312: 3, AR275: 3, AR231: 3, AR232: 3, AR192: 3, AR247: 3, AR260: 3, AR228: 3, |
| | | | | AR104: 3, AR283: 3, AR229: 3, AR210: 3, AR225: 3, AR039: 3, AR258: 3, AR205: 3, AR234: 3, AR286: 3, AR289: 3, AR308: 3, |
| | | | | AR230: 3, AR263: 3, AR219: 3, AR237: 3, AR214: 3, AR277: 2, AR204: 2, AR227: 2, AR274: 2, AR256: 2, AR226: 2, AR061: 2, |
| | | | | AR245: 2, AR212: 2, AR213: 2, AR311: 1 H0351: 10, L0439: 4, L0766: 3, L3255: 2, L2562: 2, L0775: 2, L0666: 2, L0779: 2, |
| | | | | L0780: 2, L0755: 2, L0731: 2, H0772: 1, L3388: 1, H0333: 1, H0486: 1, H0015: 1, H0687: 1, S0422: 1, L0761: 1, L0776: 1, L0659: 1, |
| | | | | L0663: 1, H0682: 1, S0152: 1, L0745: 1, L0752: 1 and S0026: 1. |
| 69 | HHENV10 | 562772 | 79 | AR242: 3, AR235: 3, AR183: 3, AR309: 3, AR282: 3, AR243: 2, AR171: 2, AR283: 1, AR055: 1, AR257: 1, AR168: 1, AR213: 1, |
| | | | | AR164: 1, AR230: 1, AR264: 1, AR287: 1 H0543: 2, H0497: 1 and H0625: 1. |
| 70 | HHGCG53 | 340818 | 80 | AR192: 3, AR169: 3, AR264: 3, AR162: 3, AR309: 3, AR245: 3, AR250: 3, AR161: 3, AR163: 3, AR171: 3, AR193: 2, AR266: 2, |
| | | | | AR176: 2, AR289: 2, AR283: 2, AR267: 2, AR197: 2, AR274: 2, AR242: 2, AR239: 2, AR295: 2, AR238: 2, AR225: 2, AR182: 2, |
| | | | | AR263: 2, AR261: 2, AR183: 2, AR172: 1, AR269: 1, AR168: 1, AR231: 1, AR216: 1, AR237: 1, AR164: 1, AR228: 1, AR096: 1, |
| | | | | AR215: 1, AR233: 1, AR252: 1, AR166: 1, AR232: 1, AR060: 1, AR277: 1, AR089: 1, AR290: 1, AR299: 1, AR240: 1, AR229: 1, |
| | | | | AR282: 1, AR296: 1 H0333: 1 |
| 71 | HHGCM76 | 662329 | 81 | AR245: 8, AR175: 7, AR183: 6, AR176: 6, AR196: 6, AR191: 6, AR174: 6, AR060: 5, AR254: 5, AR263: 5, AR039: 5, AR173: 5, |
| | | | | AR177: 5, AR309: 5, AR261: 5, AR232: 4, AR161: 4, AR162: 4, AR096: 4, AR163: 4, AR182: 4, AR264: 4, AR089: 4, AR165: 4, |
| | | | | AR198: 4, AR270: 4, AR275: 4, AR268: 4, AR178: 4, AR189: 4, AR164: 4, AR166: 3, AR286: 3, AR242: 3, AR193: 3, AR243: 3, |
| | | | | AR216: 3, AR171: 3, AR283: 3, AR266: 3, AR215: 3, AR272: 3, AR211: 3, AR188: 3, AR313: 3, AR180: 3, AR207: 3, AR269: 3, |
| | | | | AR200: 3, AR247: 3, AR316: 3, AR289: 3, AR290: 3, AR229: 3, AR294: 3, AR297: 3, AR195: 3, AR267: 3, AR061: 3, AR240: 3, |
| | | | | AR295: 3, AR197: 3, AR238: 3, AR257: 3, AR190: 3, AR055: 3, AR228: 2, AR181: 2, AR053: 2, AR033: 2, AR288: 2, AR226: 2, |
| | | | | AR282: 2, AR201: 2, AR239: 2, AR287: 2, AR231: 2, AR262: 2, AR223: 2, AR104: 2, AR285: 2, AR308: 2, AR218: 2, AR179: 2, |
| | | | | AR293: 2, AR221: 2, AR311: 2, AR271: 2, AR225: 2, AR246: 2, AR185: 2, AR237: 2, AR299: 2, AR312: 2, AR274: 2, AR233: 2, |
| | | | | AR199: 2, AR227: 2, AR219: 2, AR300: 2, AR213: 2, AR256: 2, AR296: 2, AR234: 2, AR291: 2, AR172: 2, AR205: 2, AR252: 2, |
| | | | | AR230: 1, AR203: 1, AR255: 1, AR214: 1, AR258: 1, AR224: 1, AR260: 1, AR277: 1, AR210: 1 L0803: 6, H0052: 4, H0036: 3, |
| | | | | L0665: 3, H0574: 2, H0559: 2, L0763: 2, L0809: 2, L0791: 2, L0666: 2, L0663: 2, L0748: 2, L0745: 2, L0747: 2, H0624: 1, H0265: 1, |
| | | | | H0657: 1, H0381: 1, S0045: 1, H0550: 1, H0614: 1, H0587: 1, H0333: 1, T0040: 1, L0022: 1, H0575: 1, H0564: 1, H0068: 1, |
| | | | | H0509: 1, L0769: 1, L0637: 1, L0643: 1, L0764: 1, L0662: 1, L0804: 1, L0806: 1, L0527: 1, L0783: 1, L0382: 1, L0664: 1, H0144: 1, |
| | | | | H0690: 1, H0682: 1, H0670: 1, H0694: 1, H0626: 1, L0743: 1, L0777: 1, L0780: 1, L0755: 1, H0343: 1 and S0011: 1. |
| | HHGCM76 | 383547 | 230 | |
| 72 | HHPEN62 | 695134 | 82 | AR196: 528, AR310: 360, AR218: 326, AR052: 317, AR219: 315, AR194: 272, AR211: 264, AR206: 250, AR202: 237, |
| | | | | AR205: 232, AR265: 232, AR244: 224, AR053: 218, AR184: 208, AR246: 207, AR241: 203, AR284: 198, AR309: 192, |
| | | | | AR186: 185, AR263: 184, AR273: 173, AR280: 170, AR298: 170, AR243: 168, AR247: 157, AR315: 155, AR312: 152, |
| | | | | AR311: 150, AR314: 145, AR281: 140, AR039: 139, AR182: 139, AR275: 137, AR271: 130, AR313: 130, AR185: 128, |
| | | | | AR177: 121, AR213: 121, AR204: 120, AR104: 118, AR300: 116, AR274: 115, AR210: 115, AR245: 112, AR229: 112, |
| | | | | AR240: 112, AR299: 112, AR055: 112, AR308: 112, AR061: 112, AR207: 109, AR096: 108, AR290: 107, AR237: 107, |
| | | | | AR316: 106, AR248: 104, AR264: 100, AR193: 99, AR198: 99, AR292: 99, AR268: 96, AR033: 95, AR249: 94, AR231: 94, |
| | | | | AR197: 94, AR188: 94, AR259: 93, AR233: 92, AR222: 92, AR179: 90, AR251: 88, AR192: 88, AR227: 87, AR267: 86, AR269: 84, |
| | | | | AR232: 84, AR195: 82, AR060: 81, AR200: 80, AR270: 80, AR223: 80, AR272: 79, AR089: 77, AR172: 76, AR175: 76, AR253: 74, |
| | | | | AR250: 74, AR234: 74, AR282: 72, AR212: 70, AR242: 69, AR201: 67, AR199: 66, AR176: 66, AR180: 64, AR294: 64, AR178: 64, |
| | | | | AR189: 62, AR181: 60, AR289: 59, AR283: 59, AR291: 58, AR169: 57, AR285: 56, AR171: 55, AR226: 55, AR236: 54, AR183: 53, |
| | | | | AR256: 52, AR266: 50, AR174: 50, AR295: 49, AR293: 49, AR191: 47, AR173: 47, AR286: 47, AR190: 47, AR254: 46, AR221: 46, |
| | | | | AR225: 46, AR238: 45, AR170: 43, AR258: 42, AR163: 41, AR224: 39, AR235: 39, AR277: 39, AR168: 38, AR296: 37, AR203: 37, |
| | | | | AR166: 34, AR161: 34, AR262: 34, AR164: 32, AR162: 32, AR165: 31, AR255: 30, AR288: 28, AR261: 25, AR260: 20, AR217: 20, |
| | | | | AR230: 17, AR297: 15, AR252: 15, AR287: 15, AR214: 14, AR228: 13, AR239: 12, AR216: 12, AR215: 11, AR257: 11, L0766: 7, |
| | | | | L0731: 7, H0457: 6, H0051: 6, L0754: 6, L0803: 4, L0666: 4, H0140: 3, S0474: 3, H0052: 3, L0157: 3, L0662: 3, L0659: 3, L5622: 3, |
| | | | | L0758: 3, H0657: 2, S0140: 2, S0010: 2, H0628: 2, S0036: 2, H0100: 2, S0112: 2, L0532: 2, L0438: 2, H0547: 2, L0743: 2, S0242: 2, |
| | | | | H0542: 2, H0422: 2, H0265: 1, H0656: 1, S0282: 1, S0444: 1, S0360: 1, S0408: 1, H0735: 1, H0749: 1, L0463: 1, H0351: 1, H0261: 1, |
| | | | | H0438: 1, H0586: 1, H0635: 1, H0599: 1, H0318: 1, H0581: 1, H0251: 1, H0327: 1, H0545: 1, H0046: 1, L0471: 1, S0051: 1, |
| | | | | H0375: 1, H0622: 1, T0006: 1, H0553: 1, H0598: 1, H0163: 1, H0040: 1, H0551: 1, L0564: 1, H0334: 1, H0561: 1, S0440: 1, |
| | | | | H0529: 1, L0800: 1, L0794: 1, L0651: 1, L0805: 1, L0655: 1, L0606: 1, L0527: 1, L0635: 1, L0382: 1, L0809: 1, L0792: 1, L0663: 1, |
| | | | | S0216: 1, H0144: 1, H0520: 1, H0519: 1, S0328: 1, S0380: 1, S0404: 1, H0436: 1, S0392: 1, S0028: 1, L0745: 1, L0779: 1, L0777: 1, |
| | | | | L0752: 1, S0260: 1, L0480: 1, S0026: 1, H0665: 1, S0192: 1, S0194: 1, H0423: 1, S0424: 1 and H0506: 1. |
| 73 | HJABB94 | 456466 | 83 | AR176: 9, AR225: 9, AR221: 8, AR295: 8, AR170: 8, AR264: 8, AR178: 8, AR288: 7, AR291: 7, AR180: 7, AR215: 7, AR175: 7, |
| | | | | AR275: 7, AR297: 7, AR224: 7, AR268: 7, AR293: 7, AR228: 7, AR269: 6, AR309: 6, AR270: 6, AR263: 6, AR285: 6, AR296: 6, |
| | | | | AR267: 6, AR282: 6, AR162: 6, AR239: 6, AR173: 6, AR311: 6, AR161: 5, AR231: 5, AR266: 5, AR181: 5, AR207: 5, AR182: 5, |
| | | | | AR163: 5, AR183: 5, AR053: 5, AR238: 5, AR289: 5, AR217: 5, AR213: 5, AR229: 5, AR274: 5, AR286: 5, AR177: 5, AR290: 5, |
| | | | | AR237: 5, AR287: 5, AR033: 5, AR226: 5, AR294: 5, AR277: 5, AR196: 5, AR212: 4, AR179: 4, AR235: 4, AR216: 4, AR055: 4, |
| | | | | AR223: 4, AR233: 4, AR260: 4, AR316: 4, AR211: 4, AR283: 4, AR171: 4, AR312: 4, AR192: 4, AR256: 4, AR227: 4, AR261: 4, |
| | | | | AR190: 4, AR230: 4, AR104: 4, AR300: 4, AR240: 4, AR060: 4, AR174: 4, AR169: 3, AR198: 3, AR222: 3, AR218: 3, AR191: 3, |
| | | | | AR199: 3, AR210: 3, AR189: 3, AR271: 3, AR195: 3, AR313: 3, AR219: 3, AR039: 3, AR232: 3, AR188: 3, AR096: 3, AR089: 3, |
| | | | | AR185: 3, AR200: 3, AR172: 3, AR166: 3, AR234: 3, AR168: 3, AR165: 3, AR164: 3, AR258: 3, AR257: 3, AR299: 3, AR308: 2, |
| | | | | AR201: 2, AR243: 2, AR193: 2, AR203: 2, AR061: 2, AR247: 2, AR255: 2, AR262: 2, AR272: 2, AR236: 2, AR242: 1, AR254: 1 |
| | | | | H0624: 1, S0360: 1, H0586: 1, L0021: 1, T0041: 1 and L0779: 1. |
| 74 | HJACG30 | 895505 | 84 | AR263: 8, AR165: 8, AR250: 8, AR162: 7, AR161: 7, AR205: 7, AR196: 7, AR166: 7, AR164: 7, AR215: 7, AR163: 7, AR192: 7, |
| | | | | AR198: 7, AR235: 7, AR245: 6, AR264: 6, AR216: 6, AR270: 6, AR207: 6, AR309: 6, AR246: 6, AR174: 5, AR223: 5, AR269: 5, |
| | | | | AR168: 5, AR243: 5, AR224: 5, AR180: 5, AR311: 5, AR183: 5, AR308: 5, AR254: 5, AR173: 5, AR177: 5, AR268: 5, AR242: 5, |
| | | | | AR179: 5, AR312: 5, AR176: 5, AR175: 5, AR291: 5, AR221: 5, AR181: 5, AR285: 4, AR170: 4, AR275: 4, AR295: 4, AR053: 4, |
| | | | | AR271: 4, AR191: 4, AR288: 4, AR204: 4, AR316: 4, AR274: 4, AR199: 4, AR055: 4, AR266: 4, AR210: 4, AR236: 4, AR217: 4, |
| | | | | AR240: 4, AR188: 4, AR189: 4, AR257: 4, AR247: 4, AR213: 4, AR178: 4, AR039: 4, AR222: 4, AR225: 4, AR182: 4, AR297: 4, |
| | | | | AR201: 4, AR212: 4, AR252: 4, AR296: 4, AR261: 4, AR286: 3, AR253: 3, AR060: 3, AR294: 3, AR237: 3, AR282: 3, AR267: 3, |
| | | | | AR262: 3, AR290: 3, AR172: 3, AR171: 3, AR287: 3, AR299: 3, AR231: 3, AR289: 3, AR197: 3, AR193: 3, AR293: 3, AR255: 3, |
| | | | | AR190: 3, AR200: 3, AR228: 3, AR033: 3, AR313: 3, AR211: 3, AR258: 3, AR300: 3, AR089: 3, AR238: 3, AR185: 3, AR233: 3, |
| | | | | AR229: 3, AR277: 3, AR226: 3, AR239: 3, AR230: 3, AR234: 2, AR214: 2, AR260: 2, AR096: 2, AR061: 2, AR195: 2, AR219: 2, |
| | | | | AR203: 2, AR256: 2, AR272: 2, AR232: 2, AR227: 2, AR218: 1, AR283: 1, AR104: 1, AR169: 1 H0069: 3, T0041: 2, H0436: 2, |
| | | | | H0318: 1, L4747: 1, L0646: 1, L0766: 1 and L0803: 1. |
| | HJACG30 | 821341 | 231 | |
| | HJACG30 | 774300 | 232 | |
| 75 | HJBCY35 | 719729 | 85 | AR215: 11, AR291: 11, AR225: 10, AR217: 9, AR216: 8, AR296: 8, AR214: 8, AR297: 8, AR266: 7, AR183: 7, AR257: 7, |
| | | | | AR223: 7, AR170: 7, AR269: 7, AR287: 7, AR221: 6, AR270: 6, AR171: 6, AR182: 6, AR286: 6, AR169: 6, AR172: 6, AR294: 6, |
| | | | | AR176: 6, AR235: 6, AR163: 5, AR295: 5, AR161: 5, AR168: 5, AR255: 5, AR162: 5, AR224: 5, AR285: 5, AR293: 5, AR268: 5, |
| | | | | AR289: 5, AR288: 5, AR263: 5, AR264: 5, AR165: 4, AR173: 4, AR260: 4, AR262: 4, AR175: 4, AR164: 4, AR179: 4, AR055: 4, |
| | | | | AR104: 4, AR222: 4, AR166: 4, AR060: 4, AR181: 4, AR242: 4, AR313: 4, AR283: 4, AR258: 4, AR240: 4, AR311: 4, AR290: 3, |
| | | | | AR180: 3, AR282: 3, AR247: 3, AR231: 3, AR316: 3, AR267: 3, AR233: 3, AR228: 3, AR300: 3, AR236: 3, AR177: 3, AR096: 3, |
| | | | | AR212: 3, AR256: 3, AR275: 3, AR237: 3, AR185: 3, AR239: 3, AR299: 3, AR245: 3, AR229: 3, AR039: 3, AR238: 3, AR234: 3, |
| | | | | AR191: 3, AR190: 2, AR199: 2, AR089: 2, AR178: 2, AR277: 2, AR189: 2, AR174: 2, AR205: 2, AR309: 2, AR061: 2, AR274: 2, |
| | | | | AR227: 2, AR261: 2, AR188: 2, AR218: 2, AR272: 2, AR219: 2, AR312: 2, AR196: 2, AR195: 2, AR232: 2, AR200: 2, AR211: 2, |
| | | | | AR230: 2, AR203: 1, AR210: 1, AR226: 1, AR033: 1, AR252: 1 H0618: 16, H0617: 13, H0253: 11, H0457: 6, L0766: 6, L0769: 5, |
| | | | | H0255: 4, H0559: 4, H0181: 4, L0748: 4, H0170: 3, S0051: 3, H0622: 3, L0770: 3, L0653: 3, L0743: 3, L0779: 3, H0341: 2, H0484: 2, |
| | | | | S0049: 2, H0620: 2, H0424: 2, H0135: 2, H0040: 2, H0059: 2, H0100: 2, T0042: 2, S0002: 2, L0758: 2, L0588: 2, H0171: 1, S0134: 1, |
| | | | | H0650: 1, H0657: 1, H0656: 1, S0116: 1, L0534: 1, H0637: 1, S6026: 1, S0300: 1, L0717: 1, H0549: 1, H0550: 1, S6014: 1, H0333: 1, |
| | | | | L2504: 1, L2522: 1, H0427: 1, L0021: 1, H0599: 1, H0545: 1, H0150: 1, L0157: 1, S0050: 1, H0355: 1, H0252: 1, L0483: 1, H0068: 1, |
| | | | | S0036: 1, H0038: 1, H0087: 1, H0272: 1, H0623: 1, T0041: 1, L4747: 1, L3904: 1, L3905: 1, L0761: 1, L0645: 1, L0648: 1, L0662: 1, |
| | | | | L0768: 1, L0774: 1, L0776: 1, L0658: 1, L4669: 1, L0659: 1, L0382: 1, L0665: 1, L2257: 1, L2260: 1, H0547: 1, H0711: 1, H0670: 1, |
| | | | | H0672: 1, S0350: 1, H0696: 1, H0704: 1, L0744: 1, L0439: 1, L0749: 1, L0777: 1, L0780: 1, L0731: 1, L0757: 1, S0436: 1, S0276: 1 |
| | | | | and H0543: 1. |
| 76 | HJPAD75 | 651337 | 86 | AR277: 7, AR215: 2, AR282: 2, AR246: 2, AR225: 2, AR290: 2, AR213: 2, AR172: 2, AR261: 1, AR266: 1, AR162: 1, AR165: 1, |
| | | | | AR257: 1, AR230: 1, AR168: 1, AR182: 1, AR166: 1, AR252: 1, AR196: 1, AR295: 1, AR270: 1, AR177: 1, AR285: 1, AR195: 1, |
| | | | | AR291: 1, AR217: 1, AR161: 1, AR256: 1, H0556: 6, L0769: 4, L0771: 4, H0265: 3, L0764: 3, H0083: 2, S0142: 2, L0794: 2, |
| | | | | L0803: 2, L0789: 2, L0792: 2, L0438: 2, L0754: 2, L0747: 2, L0749: 2, L0757: 2, S0356: 1, S0444: 1, S0360: 1, H0013: 1, S0010: 1, |
| | | | | H0421: 1, H0263: 1, H0596: 1, L0157: 1, L0471: 1, H0553: 1, H0628: 1, H0090: 1, H0561: 1, S0372: 1, L2270: 1, S0422: 1, L0667: 1, |
| | | | | L0768: 1, L0776: 1, L0809: 1, H0658: 1, H0648: 1, S0330: 1, H0521: 1, H0134: 1, S0027: 1, L0748: 1, L0756: 1, L0755: 1, L0731: 1, |
| | | | | S0434: 1, L0592: 1 and H0542: 1. |
| 77 | HKABZ65 | 862030 | 87 | AR313: 41, AR242: 32, AR039: 28, AR165: 25, AR163: 25, AR164: 24, AR161: 24, AR162: 24, AR166: 24, AR089: 24, AR096: 23, |
| | | | | AR173: 22, AR196: 20, AR193: 20, AR299: 20, AR300: 20, AR258: 20, AR180: 19, AR175: 19, AR178: 18, AR240: 18, AR229: 18, |
| | | | | AR234: 18, AR185: 17, AR247: 17, AR218: 17, AR262: 17, AR179: 16, AR285: 16, AR183: 16, AR269: 16, AR293: 15, AR174: 15, |
| | | | | AR199: 15, AR182: 15, AR181: 15, AR238: 14, AR191: 14, AR296: 14, AR236: 14, AR257: 14, AR316: 14, AR270: 14, AR226: 13, |
| | | | | AR219: 13, AR297: 13, AR277: 13, AR264: 12, AR200: 12, AR312: 12, AR195: 12, AR213: 12, AR192: 12, AR203: 12, AR268: 12, |
| | | | | AR212: 12, AR294: 12, AR286: 11, AR060: 11, AR230: 11, AR177: 11, AR189: 11, AR233: 11, AR260: 10, AR231: 10, AR198: 10, |
| | | | | AR290: 10, AR188: 10, AR204: 10, AR053: 9, AR287: 9, AR288: 9, AR255: 9, AR295: 9, AR033: 9, AR261: 9, AR282: 9, |
| | | | | AR104: 9, AR245: 9, AR243: 9, AR235: 9, AR228: 8, AR308: 8, AR263: 8, AR275: 8, AR291: 8, AR201: 8, AR274: 8, AR237: 7, |
| | | | | AR197: 7, AR239: 7, AR224: 7, AR311: 7, AR176: 7, AR267: 7, AR172: 7, AR256: 7, AR223: 7, AR205: 7, AR171: 6, AR227: 6, |
| | | | | AR168: 6, AR214: 6, AR207: 6, AR169: 6, AR225: 6, AR252: 6, AR250: 6, AR271: 6, AR215: 6, AR170: 6, AR211: 6, AR221: 6, |
| | | | | AR309: 5, AR283: 5, AR266: 5, AR254: 5, AR222: 5, AR190: 5, AR210: 5, AR216: 5, AR217: 5, AR232: 5, AR055: 5, AR289: 4, |
| | | | | AR253: 4, AR246: 4, AR272: 3, AR061: 2 H0494: 1 |
| | HKABZ65 | 665424 | 233 | |
| 78 | HKACB56 | 554616 | 88 | AR223: 8, AR235: 8, AR263: 7, AR222: 7, AR170: 7, AR221: 7, AR207: 7, AR216: 7, AR169: 7, AR224: 7, AR168: 7, AR171: 7, |
| | | | | AR311: 7, AR198: 7, AR309: 7, AR214: 6, AR225: 6, AR053: 6, AR197: 6, AR212: 6, AR215: 6, AR089: 6, AR264: 6, AR245: 6, |
| | | | | AR205: 5, AR217: 5, AR165: 5, AR163: 5, AR161: 5, AR162: 5, AR164: 5, AR166: 5, AR275: 5, AR308: 5, AR213: 5, AR172: 5, |
| | | | | AR312: 4, AR277: 4, AR274: 4, AR246: 4, AR196: 4, AR060: 4, AR271: 4, AR282: 4, AR195: 4, AR295: 4, AR261: 4, AR269: 4, |
| | | | | AR230: 4, AR316: 4, AR181: 4, AR288: 4, AR176: 4, AR055: 3, AR240: 3, AR204: 3, AR297: 3, AR283: 3, AR313: 3, AR177: 3, |
| | | | | AR210: 3, AR285: 3, AR242: 3, AR296: 3, AR039: 3, AR199: 3, AR096: 3, AR173: 3, AR272: 3, AR236: 3, AR200: 3, AR252: 3, |
| | | | | AR254: 3, AR238: 3, AR175: 3, AR291: 3, AR193: 3, AR299: 3, AR247: 3, AR191: 3, AR033: 3, AR188: 3, AR286: 3, AR289: 3, |
| | | | | AR300: 3, AR185: 3, AR201: 3, AR174: 3, AR270: 3, AR262: 3, AR237: 2, AR293: 2, AR104: 2, AR232: 2, AR287: 2, AR294: 2, |
| | | | | AR178: 2, AR189: 2, AR229: 2, AR234: 2, AR226: 2, AR239: 2, AR061: 2, AR182: 2, AR290: 2, AR203: 2, AR227: 2, AR255: 2, |
| | | | | AR183: 2, AR190: 2, AR233: 2, AR211: 2, AR231: 2, AR257: 2, AR267: 2, AR228: 2, AR243: 2, AR258: 2, AR256: 2, AR179: 1, |
| | | | | AR218: 1, AR268: 1, AR219: 1, AR192: 1, AR180: 1, AR253: 1 H0494: 4, L0045: 1 and L0806: 1. |
| 79 | HKACD58 | 1352202 | 89 | AR261: 30, AR235: 29, AR283: 29, AR297: 20, AR291: 17, AR285: 16, AR286: 15, AR295: 13, AR183: 13, AR269: 13, AR287: 12, |
| | | | | AR258: 11, AR268: 11, AR266: 11, AR289: 10, AR161: 10, AR162: 10, AR288: 10, AR236: 10, AR260: 10, AR165: 10, AR163: 10, |
| | | | | AR166: 9, AR207: 9, AR164: 9, AR270: 9, AR282: 9, AR277: 8, AR223: 8, AR214: 8, AR243: 8, AR215: 8, AR224: 8, AR296: 8, |
| | | | | AR096: 8, AR039: 8, AR172: 8, AR221: 8, AR192: 8, AR316: 8, AR182: 8, AR104: 8, AR089: 8, AR222: 8, AR293: 7, AR173: 7, |
| | | | | AR176: 7, AR255: 7, AR169: 7, AR171: 7, AR311: 7, AR257: 7, AR313: 7, AR225: 7, AR245: 7, AR254: 7, AR180: 7, AR211: 7, |
| | | | | AR262: 7, AR195: 7, AR290: 6, AR240: 6, AR175: 6, AR179: 6, AR217: 6, AR247: 6, AR256: 6, AR055: 6, AR309: 6, AR168: 6, |
| | | | | AR300: 6, AR294: 6, AR197: 6, AR219: 6, AR263: 6, AR299: 6, AR242: 6, AR216: 6, AR060: 5, AR238: 5, AR267: 5, AR185: 5, |
| | | | | AR250: 5, AR264: 5, AR181: 5, AR234: 5, AR053: 5, AR199: 5, AR275: 5, AR178: 5, AR308: 5, AR033: 5, AR274: 5, AR193: 5, |
| | | | | AR177: 5, AR218: 5, AR174: 4, AR213: 4, AR170: 4, AR246: 4, AR212: 4, AR312: 4, AR198: 4, AR253: 4, AR205: 4, AR271: 4, |
| | | | | AR189: 4, AR191: 4, AR210: 4, AR201: 4, AR239: 3, AR237: 3, AR252: 3, AR196: 3, AR190: 3, AR233: 3, AR231: 3, AR227: 3, |
| | | | | AR061: 3, AR226: 3, AR230: 3, AR272: 3, AR229: 3, AR204: 3, AR232: 3, AR203: 3, AR200: 3, AR188: 2, AR228: 2 S0360: 12, |
| | | | | S0436: 3, S0194: 3, S0114: 2, H0483: 2, S0408: 2, L3504: 2, H0575: 2, H0581: 2, S0344: 2, L2262: 2, H0519: 2, L0754: 2, H0139: 1, |
| | | | | L2884: 1, H0657: 1, H0656: 1, S0420: 1, S0356: 1, S0410: 1, L2333: 1, H0151: 1, S0046: 1, L3127: 1, H0549: 1, H0613: 1, H0427: 1, |
| | | | | H0546: 1, H0081: 1, H0355: 1, S0312: 1, H0032: 1, H0383: 1, H0551: 1, H0264: 1, T0042: 1, H0494: 1, H0386: 1, H0509: 1, |
| | | | | H0649: 1, S0210: 1, L0646: 1, L0804: 1, L0805: 1, L0809: 1, L5622: 1, L2651: 1, L2265: 1, L2702: 1, H0682: 1, H0435: 1, H0670: 1, |
| | | | | H0672: 1, H0521: 1, H0696: 1, H0134: 1, S0206: 1, L0741: 1, L0743: 1, L0744: 1, L0756: 1, L0596: 1, L0581: 1, L0593: 1, L0595: 1, |
| | | | | L0366: 1, S0242: 1, S0196: 1, H0423: 1 and H0506: 1. |
| | HKACD58 | 552465 | 234 | |
| 80 | HKAEV06 | 1352263 | 90 | AR272: 35, AR165: 34, AR163: 33, AR164: 33, AR161: 32, AR162: 32, AR245: 32, AR166: 32, AR274: 28, AR212: 28, AR205: 26, |
| | | | | AR311: 23, AR242: 22, AR264: 21, AR308: 20, AR214: 20, AR174: 19, AR197: 19, AR216: 16, AR223: 15, AR222: 15, AR313: 15, |
| | | | | AR213: 14, AR171: 14, AR312: 14, AR195: 14, AR225: 14, AR247: 13, AR201: 13, AR254: 12, AR309: 12, AR053: 12, AR275: 12, |
| | | | | AR263: 12, AR168: 12, AR246: 11, AR217: 11, AR224: 11, AR215: 11, AR252: 11, AR089: 11, AR170: 10, AR243: 10, AR172: 10, |
| | | | | AR192: 10, AR221: 9, AR241: 9, AR189: 9, AR185: 9, AR250: 9, AR240: 8, AR039: 8, AR199: 8, AR204: 8, AR179: 7, AR198: 7, |
| | | | | AR169: 7, AR096: 7, AR193: 7, AR177: 7, AR188: 7, AR297: 6, AR253: 6, AR236: 6, AR249: 6, AR300: 6, AR262: 6, AR271: 6, |
| | | | | AR277: 6, AR183: 6, AR104: 6, AR261: 6, AR299: 6, AR234: 5, AR239: 5, AR194: 5, AR173: 5, AR181: 5, AR265: 5, AR257: 5, |
| | | | | AR316: 5, AR288: 5, AR207: 5, AR190: 5, AR060: 5, AR282: 5, AR180: 5, AR233: 5, AR230: 4, AR231: 4, AR293: 4, AR176: 4, |
| | | | | AR178: 4, AR290: 4, AR287: 4, AR191: 4, AR196: 4, AR291: 4, AR238: 4, AR255: 4, AR296: 4, AR235: 4, AR273: 4, AR289: 3, |
| | | | | AR270: 3, AR266: 3, AR052: 3, AR203: 3, AR229: 3, AR200: 3, AR206: 3, AR228: 3, AR294: 3, AR283: 3, AR295: 3, AR033: 3, |
| | | | | AR175: 2, AR269: 2, AR268: 2, AR248: 2, AR210: 2, AR237: 2, AR182: 2, AR285: 2, AR258: 2, AR286: 2, AR186: 2, AR267: 2, |
| | | | | AR061: 2, AR232: 2, AR226: 2, AR244: 2, AR260: 2, AR219: 1, AR055: 1, AR227: 1, AR211: 1, AR310: 1, AR281: 1, AR218: 1, |
| | | | | AR256: 1 L0438: 2, L0758: 2, S0442: 1, S0354: 1, S0444: 1, H0741: 1, L0021: 1, T0082: 1, H0046: 1, H0494: 1, S0440: 1, L3815: 1, |
| | | | | L0800: 1, L0662: 1, L5574: 1, L0803: 1, L0776: 1, L0659: 1, L2655: 1, L2653: 1, S0374: 1, H0547: 1, H0672: 1, S0330: 1, H0521: 1, |
| | | | | H0696: 1, L0439: 1, L0752: 1, L0594: 1 and H0543: 1. |
| | HKAEV06 | 638238 | 235 | |
| 81 | HKAFT66 | 946512 | 91 | AR214: 32, AR195: 28, AR222: 28, AR169: 27, AR223: 26, AR224: 25, AR168: 23, AR172: 23, AR235: 22, AR217: 21, AR311: 20, |
| | | | | AR216: 20, AR207: 19, AR221: 19, AR171: 18, AR263: 18, AR225: 17, AR264: 16, AR215: 15, AR281: 15, AR196: 14, AR170: 14, |
| | | | | AR212: 14, AR261: 13, AR252: 13, AR163: 13, AR288: 12, AR265: 12, AR161: 12, AR162: 12, AR242: 12, AR309: 12, AR211: 11, |
| | | | | AR165: 11, AR166: 11, AR236: 11, AR164: 11, AR199: 11, AR308: 11, AR315: 11, AR210: 10, AR254: 10, AR193: 10, AR213: 10, |
| | | | | AR174: 10, AR245: 9, AR191: 9, AR297: 9, AR053: 9, AR188: 9, AR197: 9, AR181: 9, AR280: 8, AR173: 8, AR200: 8, AR180: 8, |
| | | | | AR240: 8, AR310: 8, AR189: 8, AR287: 8, AR239: 8, AR272: 7, AR251: 7, AR295: 7, AR262: 7, AR177: 7, AR314: 7, AR312: 7, |
| | | | | AR190: 7, AR230: 7, AR033: 7, AR271: 7, AR282: 6, AR229: 6, AR283: 6, AR257: 6, AR192: 6, AR198: 6, AR275: 6, AR205: 6, |
| | | | | AR201: 6, AR203: 6, AR313: 6, AR249: 6, AR274: 6, AR300: 6, AR260: 6, AR089: 5, AR277: 5, AR238: 5, AR176: 5, AR299: 5, |
| | | | | AR246: 5, AR285: 5, AR178: 5, AR218: 5, AR316: 5, AR286: 5, AR258: 5, AR247: 4, AR291: 4, AR255: 4, AR248: 4, AR060: 4, |
| | | | | AR052: 4, AR231: 4, AR270: 4, AR226: 4, AR289: 4, AR228: 4, AR253: 4, AR096: 4, AR175: 4, AR185: 4, AR234: 4, AR269: 4, |
| | | | | AR055: 4, AR227: 4, AR183: 3, AR232: 3, AR039: 3, AR219: 3, AR296: 3, AR179: 3, AR237: 3, AR256: 3, AR104: 3, AR290: 3, |
| | | | | AR233: 3, AR204: 3, AR293: 3, AR250: 3, AR268: 3, AR243: 2, AR266: 2, AR267: 2, AR061: 2, AR294: 2, AR182: 2, AR202: 2, |
| | | | | AR273: 1, AR186: 1 S0474: 5, S0422: 3, H0580: 2, S0444: 1, H0494: 1 and H0543: 1. |
| | HKAFT66 | 889258 | 236 | |
| | HKAFT66 | 904790 | 237 | |
| 82 | HKBIE57 | 876571 | 92 | AR253: 4, AR225: 3, AR171: 3, AR205: 3, AR192: 3, AR169: 3, AR245: 2, AR282: 2, AR193: 2, AR274: 2, AR039: 2, AR291: 2, |
| | | | | AR212: 2, AR163: 2, AR162: 2, AR266: 2, AR161: 2, AR269: 2, AR264: 1, AR271: 1, AR178: 1, AR316: 1, AR275: 1, AR261: 1, |
| | | | | AR168: 1, AR270: 1, AR183: 1, AR297: 1, AR283: 1 L0747: 4, L0766: 3, L0776: 3, L0665: 3, H0328: 2, L0763: 2, L0769: 2, |
| | | | | L0772: 2, L0764: 2, L0666: 2, L0745: 2, L0750: 2, L0777: 2, L0759: 2, L0608: 2, H0556: 1, S0116: 1, H0384: 1, S0360: 1, S0408: 1, |
| | | | | H0637: 1, H0722: 1, H0735: 1, H0619: 1, H0492: 1, H0156: 1, H0421: 1, H0620: 1, S0051: 1, H0083: 1, H0510: 1, H0266: 1, |
| | | | | H0031: 1, H0634: 1, H0560: 1, S0440: 1, H0132: 1, H0695: 1, L0800: 1, L0521: 1, L0662: 1, L0744: 1, L0806: 1, L0807: 1, H0144: 1, |
| | | | | H0690: 1, H0658: 1, H0521: 1, H0522: 1, L0439: 1, L0746: 1, L0752: 1, L0480: 1, L0589: 1, L0592: 1, H0543: 1 and H0422: 1. |
| | HXB1E57 | 654871 | 238 | |
| 83 | HKFBC53 | 1352286 | 93 | AR249: 155, AR248: 131, AR251: 111, AR265: 54, AR253: 42, AR096: 23, AR263: 23, AR244: 18, AR290: 13, AR268: 13, |
| | | | | AR246: 12, AR184: 11, AR177: 11, AR194: 9, AR267: 8, AR229: 8, AR270: 8, AR247: 7, AR240: 7, AR269: 7, AR183: 6, |
| | | | | AR202: 5, AR175: 5, AR234: 5, AR241: 5, AR316: 5, AR206: 5, AR313: 5, AR055: 4, AR299: 4, AR033: 4, AR238: 3, AR292: 3, |
| | | | | AR061: 3, AR182: 3, AR171: 3, AR273: 3, AR224: 3, AR274: 3, AR198: 3, AR275: 3, AR216: 3, AR266: 3, AR195: 3, AR284: 3, |
| | | | | AR168: 3, AR237: 2, AR215: 2, AR282: 2, AR285: 2, AR242: 2, AR310: 2, AR250: 2, AR300: 2, AR298: 2, AR186: 2, AR039: 2, |
| | | | | AR231: 2, AR291: 2, AR223: 2, AR243: 2, AR289: 2, AR179: 2, AR204: 2, AR104: 2, AR205: 2, AR257: 2, AR271: 2, AR053: 2, |
| | | | | AR226: 2, AR277: 2, AR217: 2, AR232: 2, AR192: 2, AR296: 2, AR185: 2, AR264: 1, AR295: 1, AR089: 1, AR261: 1, AR213: 1, |
| | | | | AR259: 1, AR166: 1, AR286: 1, AR308: 1, AR233: 1, AR201: 1 L0794: 11, H0521: 11, S0002: 8, L0805: 8, L0803: 7, S0278: 6, |
| | | | | S0144: 6, L0774: 4, L0777: 4, S0380: 3, H0265: 2, H0556: 2, H0255: 2, H0638: 2, L0761: 2, L0776: 2, L0809: 2, S0406: 2, S0298: 1, |
| | | | | S0420: 1, S0356: 1, H0431: 1, H0618: 1, H0546: 1, H0100: 1, H0429: 1, H0494: 1, H0509: 1, S0142: 1, S0426: 1, L0640: 1, L0763: 1, |
| | | | | L0770: 1, L3904: 1, L0800: 1, L0804: 1, L0806: 1, L0807: 1, L4669: 1, L5622: 1, L5623: 1, L0791: 1, L0792: 1, L0666: 1, L2261: 1, |
| | | | | S0374: 1, H0690: 1, H0522: 1, S0390: 1, L0740: 1, L0751: 1, L0756: 1, L0779: 1 and L0731: 1. |
| | HKFBC53 | 701893 | 239 | |
| | HKFBC53 | 513190 | 240 | |
| | HKFBC53 | 383426 | 241 | |
| 84 | HKGDL36 | 877489 | 94 | AR274: 28, AR214: 24, AR168: 23, AR216: 22, AR205: 21, AR245: 20, AR224: 20, AR272: 18, AR222: 17, AR199: 17, AR171: 17, |
| | | | | AR223: 17, AR252: 17, AR215: 16, AR213: 16, AR312: 16, AR195: 15, AR217: 15, AR170: 15, AR247: 15, AR166: 14, AR313: 14, |
| | | | | AR212: 14, AR246: 14, AR225: 14, AR165: 13, AR164: 13, AR172: 13, AR311: 13, AR308: 13, AR169: 12, AR162: 12, AR161: 12, |
| | | | | AR053: 12, AR221: 12, AR163: 12, AR210: 11, AR179: 11, AR188: 11, AR197: 10, AR275: 10, AR263: 10, AR250: 10, AR189: 9, |
| | | | | AR174: 9, AR264: 9, AR242: 9, AR236: 9, AR089: 9, AR201: 9, AR254: 9, AR096: 9, AR193: 8, AR299: 8, AR271: 8, AR243: 8, |
| | | | | AR175: 8, AR309: 8, AR253: 8, AR039: 8, AR291: 8, AR180: 8, AR296: 8, AR190: 7, AR185: 7, AR288: 7, AR173: 7, AR240: 7, |
| | | | | AR178: 7, AR295: 7, AR293: 7, AR218: 7, AR267: 7, AR183: 6, AR211: 6, AR289: 6, AR282: 6, AR262: 6, AR191: 6, AR300: 6, |
| | | | | AR219: 6, AR277: 6, AR316: 6, AR192: 6, AR290: 6, AR270: 6, AR177: 6, AR261: 6, AR269: 6, AR268: 6, AR266: 6, AR255: 6, |
| | | | | AR060: 6, AR204: 6, AR297: 6, AR231: 5, AR203: 5, AR200: 5, AR230: 5, AR257: 5, AR285: 5, AR198: 5, AR237: 5, AR294: 5, |
| | | | | AR256: 5, AR283: 5, AR181: 5, AR287: 4, AR239: 4, AR260: 4, AR229: 4, AR258: 4, AR104: 4, AR234: 4, AR233: 4, AR061: 4, |
| | | | | AR207: 4, AR182: 4, AR176: 4, AR286: 4, AR232: 4, AR238: 3, AR033: 3, AR226: 3, AR196: 3, AR055: 3, AR227: 3, AR235: 2, |
| | | | | AR228: 2 H0424: 28, L0803: 25, L0805: 9, L0636: 7, L0774: 5, L0770: 4, H0661: 2, S0222: 2, L0157: 2, L0638: 2, L3904: 2, |
| | | | | L0776: 2, L0659: 2, L0809: 2, L0789: 2, H0539: 2, L0592: 2, H0295: 1, S0114: 1, H0663: 1, S6026: 1, H0549: 1, H0748: 1, H0571: 1, |
| | | | | S0051: 1, T0006: 1, H0033: 1, H0604: 1, H0213: 1, H0418: 1, H0417: 1, H0538: 1, L0769: 1, L3905: 1, L0794: 1, L0647: 1, L0787: 1, |
| | | | | H0684: 1, H0672: 1, L0749: 1, L0753: 1, L0759: 1, S0260: 1, S0434: 1 and S0436: 1. |
| | HKGDL36 | 704088 | 242 | |
| 85 | HKISB57 | 625956 | 95 | AR161: 12, AR162: 12, AR163: 12, AR165: 12, AR164: 11, AR166: 11, AR089: 8, AR225: 7, AR178: 6, AR183: 6, AR172: 6, |
| | | | | AR300: 5, AR224: 5, AR181: 5, AR221: 5, AR223: 5, AR170: 5, AR299: 5, AR039: 4, AR291: 4, AR096: 4, AR268: 4, AR275: 4, |
| | | | | AR286: 4, AR274: 4, AR055: 4, AR247: 4, AR222: 4, AR269: 4, AR258: 4, AR257: 4, AR179: 3, AR240: 3, AR242: 3, AR173: 3, |
| | | | | AR182: 3, AR262: 3, AR270: 3, AR272: 3, AR189: 3, AR316: 3, AR267: 3, AR175: 3, AR245: 3, AR313: 3, AR287: 3, AR296: 3, |
| | | | | AR231: 2, AR210: 2, AR171: 2, AR190: 2, AR217: 2, AR205: 2, AR277: 2, AR230: 2, AR295: 2, AR290: 2, AR263: 2, AR060: 2, |
| | | | | AR309: 2, AR191: 2, AR228: 2, AR229: 2, AR104: 2, AR261: 2, AR288: 2, AR174: 2, AR282: 2, AR246: 2, AR255: 2, AR312: 2, |
| | | | | AR237: 2, AR169: 2, AR193: 2, AR271: 2, AR201: 2, AR233: 2, AR239: 2, AR197: 1, AR061: 1, AR226: 1, AR177: 1, AR213: 1, |
| | | | | AR195: 1, AR033: 1, AR188: 1, AR238: 1, AR196: 1, AR185: 1, AR293: 1, AR176: 1, AR234: 1, AR227: 1 L0747: 5, L0731: 5, |
| | | | | H0031: 4, L0599: 4, S0045: 3, H0411: 3, H0494: 3, L0783: 3, L0743: 3, L0758: 3, L0759: 3, L0604: 3, H0295: 2, S0356: 2, S0360: 2, |
| | | | | S0046: 2, H0413: 2, L0774: 2, H0651: 2, S0027: 2, L0748: 2, L0439: 2, L0752: 2, L0601: 2, H0484: 1, S0132: 1, H0586: 1, H0333: 1, |
| | | | | H0486: 1, H0042: 1, H0122: 1, H0546: 1, H0041: 1, H0050: 1, H0408: 1, H0288: 1, H0688: 1, H0424: 1, H0644: 1, H0383: 1, |
| | | | | L0772: 1, L0764: 1, L0662: 1, L0364: 1, L0653: 1, L0782: 1, L0789: 1, L0666: 1, L0663: 1, L0664: 1, H0144: 1, S0148: 1, H0593: 1, |
| | | | | H0666: 1, S0330: 1, S0044: 1, S0037: 1, S3014: 1, L0757: 1, S0031: 1, H0667: 1 and H0506: 1. |
| 86 | HKMLM11 | 514788 | 96 | AR060: 13, AR039: 7, AR282: 7, AR170: 7, AR252: 7, AR263: 7, AR207: 7, AR309: 7, AR299: 6, AR224: 6, AR096: 5, AR161: 5, |
| | | | | AR162: 5, AR264: 5, AR163: 5, AR311: 5, AR165: 5, AR214: 5, AR225: 5, AR235: 5, AR164: 5, AR277: 5, AR166: 5, AR308: 5, |
| | | | | AR245: 5, AR246: 5, AR217: 5, AR182: 5, AR168: 4, AR283: 4, AR195: 4, AR275: 4, AR316: 4, AR271: 4, AR171: 4, AR312: 4, |
| | | | | AR261: 4, AR053: 4, AR212: 4, AR222: 4, AR272: 4, AR270: 4, AR192: 4, AR213: 4, AR274: 4, AR193: 4, AR313: 4, AR173: 4, |
| | | | | AR300: 4, AR286: 3, AR175: 3, AR089: 3, AR291: 3, AR180: 3, AR181: 3, AR269: 3, AR288: 3, AR223: 3, AR176: 3, AR169: 3, |
| | | | | AR297: 3, AR289: 3, AR250: 3, AR285: 3, AR254: 3, AR201: 3, AR239: 3, AR229: 3, AR267: 3, AR104: 3, AR293: 3, AR198: 3, |
| | | | | AR240: 3, AR230: 3, AR205: 3, AR243: 3, AR296: 3, AR196: 3, AR236: 3, AR227: 3, AR247: 3, AR216: 3, AR204: 3, AR172: 3, |
| | | | | AR295: 3, AR268: 2, AR199: 2, AR257: 2, AR178: 2, AR055: 2, AR221: 2, AR237: 2, AR234: 2, AR174: 2, AR177: 2, AR287: 2, |
| | | | | AR294: 2, AR188: 2, AR033: 2, AR238: 2, AR218: 2, AR231: 2, AR266: 2, AR210: 2, AR226: 2, AR228: 2, AR232: 2, AR185: 2, |
| | | | | AR262: 2, AR061: 2, AR255: 2, AR233: 2, AR203: 2, AR191: 2, AR200: 2, AR260: 2, AR290: 2, AR189: 2, AR179: 2, AR258: 2, |
| | | | | AR219: 2, AR197: 1, AR242: 1, AR183: 1, AR215: 1 H0620: 7, L3659: 3, S0442: 3, H0036: 3, H0150: 3, S0410: 2, H0722: 2, |
| | | | | H0431: 2, H0012: 2, L0774: 2, H0740: 1, H0341: 1, S0358: 1, H0792: 1, H0549: 1, H0590: 1, H0746: 1, H0510: 1, H0059: 1, |
| | | | | T0042: 1, L0475: 1, L0803: 1, L0775: 1, H0593: 1, L3215: 1, S0013: 1, L0758: 1 and H0707: 1. |
| 87 | HKMMW74 | 581399 | 97 | AR229: 11, AR313: 11, AR163: 10, AR162: 10, AR161: 10, AR242: 9, AR176: 9, AR039: 9, AR204: 9, AR197: 8, AR309: 8, |
| | | | | AR192: 8, AR180: 8, AR264: 8, AR181: 8, AR178: 8, AR089: 8, AR177: 8, AR164: 8, AR247: 7, AR268: 7, AR196: 7, AR239: 7, |
| | | | | AR166: 7, AR182: 7, AR252: 7, AR271: 7, AR246: 7, AR282: 7, AR300: 7, AR165: 7, AR269: 7, AR233: 7, AR173: 7, AR174: 7, |
| | | | | AR179: 7, AR267: 6, AR236: 6, AR228: 6, AR238: 6, AR175: 6, AR198: 6, AR096: 6, AR060: 6, AR299: 6, AR235: 6, AR257: 6, |
| | | | | AR240: 6, AR261: 6, AR055: 6, AR293: 6, AR275: 6, AR226: 5, AR237: 5, AR185: 5, AR183: 5, AR243: 5, AR201: 5, AR234: 5, |
| | | | | AR195: 5, AR250: 5, AR207: 5, AR291: 5, AR245: 5, AR316: 5, AR266: 5, AR191: 5, AR312: 5, AR053: 5, AR227: 5, AR231: 5, |
| | | | | AR254: 5, AR230: 5, AR262: 5, AR270: 5, AR203: 5, AR224: 4, AR289: 4, AR263: 4, AR285: 4, AR212: 4, AR193: 4, AR199: 4, |
| | | | | AR258: 4, AR216: 4, AR218: 4, AR061: 4, AR213: 4, AR255: 4, AR217: 4, AR297: 4, AR277: 4, AR200: 4, AR104: 4, AR272: 4, |
| | | | | AR232: 4, AR205: 4, AR274: 4, AR296: 4, AR295: 3, AR286: 3, AR033: 3, AR189: 3, AR287: 3, AR290: 3, AR256: 3, AR190: 3, |
| | | | | AR311: 3, AR283: 3, AR169: 3, AR168: 3, AR170: 3, AR215: 3, AR253: 3, AR308: 3, AR288: 3, AR188: 3, AR171: 3, AR214: 3, |
| | | | | AR223: 3, AR219: 2, AR294: 2, AR221: 2, AR260: 2, AR222: 2, AR172: 2, AR210: 1, AR225: 1 H0431: 1 |
| 88 | HLDON23 | 636083 | 98 | AR235: 6, AR196: 5, AR161: 5, AR162: 5, AR163: 4, AR264: 4, AR176: 4, AR165: 4, AR164: 4, AR238: 4, AR214: 4, AR181: 4, |
| | | | | AR166: 4, AR236: 4, AR191: 4, AR253: 4, AR188: 4, AR177: 3, AR261: 3, AR199: 3, AR252: 3, AR178: 3, AR288: 3, AR247: 3, |
| | | | | AR033: 3, AR182: 3, AR286: 3, AR190: 3, AR296: 3, AR170: 3, AR269: 3, AR262: 3, AR200: 3, AR242: 3, AR255: 3, AR183: 3, |
| | | | | AR295: 3, AR205: 3, AR297: 3, AR224: 3, AR285: 3, AR312: 3, AR287: 3, AR268: 3, AR189: 3, AR257: 3, AR282: 3, AR291: 3, |
| | | | | AR175: 3, AR309: 3, AR270: 3, AR171: 3, AR180: 3, AR299: 3, AR293: 2, AR217: 2, AR222: 2, AR179: 2, AR277: 2, AR271: 2, |
| | | | | AR229: 2, AR272: 2, AR174: 2, AR240: 2, AR225: 2, AR243: 2, AR173: 2, AR308: 2, AR228: 2, AR289: 2, AR203: 2, AR239: 2, |
| | | | | AR254: 2, AR226: 2, AR233: 2, AR213: 2, AR104: 2, AR258: 2, AR290: 2, AR227: 2, AR294: 2, AR267: 2, AR234: 2, AR096: 2, |
| | | | | AR169: 2, AR237: 2, AR210: 2, AR231: 2, AR313: 2, AR311: 2, AR218: 2, AR219: 2, AR172: 2, AR275: 2, AR039: 2, AR060: 2, |
| | | | | AR316: 2, AR211: 2, AR300: 2, AR230: 2, AR185: 2, AR061: 1, AR089: 1, AR216: 1, AR212: 1, AR193: 1, AR260: 1, AR201: 1, |
| | | | | AR232: 1, AR055: 1 L0805: 8, L0809: 6, L0439: 5, L0777: 5, L0748: 4, L0800: 3, L0662: 3, L0659: 3, L0750: 3, L0758: 3, H0208: 2 |
| | | | | H0123: 2, H0617: 2, L0769: 2, L0803: 2, L0776: 2, L0666: 2, L0438: 2, L0780: 2, L0731: 2, L3643: 1, H0741: 1, H0497: 1, L0622: 1, |
| | | | | T0109: 1, H0581: 1, L0738: 1, H0546: 1, H0024: 1, T0010: 1, H0510: 1, H0428: 1, H0622: 1, H0673: 1, H0598: 1, S0036: 1, |
| | | | | H0163: 1, H0413: 1, L0370: 1, T0041: 1, L0637: 1, L5566: 1, L0667: 1, L0772: 1, L0646: 1, L0764: 1, L0794: 1, L0766: 1, L0649: 1, |
| | | | | L0657: 1, L0788: 1, L0663: 1, S0374: 1, H0666: 1, S0330: 1, H0539: 1, H0521: 1, H0696: 1, H0478: 1, L0741: 1, L0751: 1, L0745: 1, |
| | | | | L0747: 1, L0749: 1 and L0752: 1. |
| 89 | HLDQR62 | 753742 | 99 | AR165: 9, AR164: 9, AR162: 8, AR166: 8, AR163: 8, AR161: 8, AR195: 7, AR242: 7, AR197: 6, AR176: 6, AR207: 6, AR181: 6, |
| | | | | AR178: 5, AR254: 5, AR272: 5, AR245: 5, AR239: 5, AR257: 4, AR261: 4, AR170: 4, AR193: 4, AR252: 4, AR282: 4, AR311: 4, |
| | | | | AR308: 4, AR212: 4, AR288: 4, AR297: 4, AR228: 4, AR168: 3, AR230: 3, AR173: 3, AR266: 3, AR235: 3, AR255: 3, AR262: 3, |
| | | | | AR174: 3, AR199: 3, AR180: 3, AR214: 3, AR175: 3, AR190: 3, AR201: 3, AR291: 3, AR183: 3, AR237: 3, AR191: 3, AR287: 3, |
| | | | | AR286: 3, AR196: 3, AR236: 3, AR232: 3, AR229: 3, AR089: 3, AR289: 3, AR243: 3, AR171: 3, AR270: 3, AR217: 3, AR182: 3, |
| | | | | AR238: 3, AR203: 3, AR205: 3, AR189: 3, AR233: 3, AR309: 2, AR053: 2, AR177: 2, AR188: 2, AR215: 2, AR210: 2, AR274: 2, |
| | | | | AR234: 2, AR221: 2, AR296: 2, AR268: 2, AR263: 2, AR293: 2, AR204: 2, AR179: 2, AR240: 2, AR227: 2, AR312: 2, AR033: 2, |
| | | | | AR310: 2, AR226: 2, AR264: 2, AR246: 2, AR185: 2, AR216: 2, AR200: 2, AR225: 2, AR295: 2, AR172: 2, AR258: 2, AR061: 2, |
| | | | | AR247: 2, AR224: 2, AR260: 2, AR231: 2, AR285: 2, AR267: 2, AR277: 2, AR198: 2, AR275: 2, AR060: 2, AR250: 2, AR256: 2, |
| | | | | AR213: 2, AR269: 2, AR211: 2, AR299: 2, AR290: 2, AR313: 2, AR316: 2, AR192: 1, AR283: 1, AR104: 1, AR294: 1, AR055: 1, |
| | | | | AR271: 1, AR281: 1, AR300: 1, AR039: 1, AR280: 1, AR052: 1 S0007: 10, L0748: 7, H0013: 3, S0010: 3, L0771: 3, L0438: 3, |
| | | | | L0439: 3, L0591: 3, S0040: 2, S0222: 2, H0156: 2, H0083: 2, H0510: 2, S0003: 2, H0032: 2, L3905: 2, L0519: 2, H0521: 2, S0260: 2, |
| | | | | L0596: 2, S0276: 2, H0265: 1, H0556: 1, S0134: 1, L3002: 1, H0675: 1, H0734: 1, S0346: 1, H0196: 1, H0309: 1, H0327: 1, H0051: 1, |
| | | | | H0266: 1, S0314: 1, S0022: 1, H0031: 1, H0553: 1, H0212: 1, H0038: 1, H0380: 1, H0264: 1, H0100: 1, H0509: 1, S0144: 1, L0763: 1, |
| | | | | L0372: 1, L0374: 1, L0803: 1, L0775: 1, L0776: 1, L0809: 1, S0216: 1, L2260: 1, L0710: 1, L2261: 1, L2654: 1, S0148: 1, L3831: 1, |
| | | | | H0670: 1, H0539: 1, H0518: 1, H0696: 1, S0146: 1, S0406: 1, S0028: 1, L0749: 1, L0779: 1, S0026: 1, S0192: 1 and S0242: 1. |
| 90 | HLDQU79 | 740755 | 100 | AR253: 8, AR171: 7, AR245: 6, AR243: 5, AR183: 5, AR263: 5, AR264: 4, AR250: 4, AR269: 4, AR060: 4, AR180: 4, AR270: 4, |
| | | | | AR309: 4, AR162: 4, AR268: 4, AR161: 4, AR165: 4, AR192: 4, AR176: 4, AR164: 4, AR055: 4, AR163: 4, AR213: 4, AR195: 4, |
| | | | | AR271: 4, AR166: 3, AR275: 3, AR240: 3, AR282: 3, AR312: 3, AR246: 3, AR178: 3, AR181: 3, AR311: 3, AR168: 3, AR289: 3, |
| | | | | AR182: 3, AR193: 3, AR217: 3, AR179: 3, AR212: 3, AR237: 3, AR238: 3, AR299: 3, AR199: 3, AR252: 3, AR229: 3, AR242: 2, |
| | | | | AR185: 2, AR300: 2, AR277: 2, AR175: 2, AR293: 2, AR257: 2, AR308: 2, AR177: 2, AR198: 2, AR061: 2, AR214: 2, AR174: 2, |
| | | | | AR104: 2, AR231: 2, AR316: 2, AR201: 2, AR233: 2, AR230: 2, AR224: 2, AR236: 2, AR239: 2, AR228: 2, AR188: 2, AR223: 2, |
| | | | | AR189: 2, AR247: 2, AR294: 2, AR226: 2, AR266: 2, AR221: 2, AR285: 2, AR191: 2, AR089: 2, AR216: 2, AR200: 2, AR207: 2, |
| | | | | AR272: 2, AR232: 2, AR190: 2, AR290: 2, AR283: 2, AR096: 2, AR222: 2, AR296: 2, AR039: 2, AR267: 2, AR205: 2, AR211: 1, |
| | | | | AR196: 1, AR173: 1, AR033: 1, AR218: 1, AR295: 1, AR255: 1, AR262: 1, AR215: 1, AR227: 1, AR254: 1, AR234: 1, AR313: 1, |
| | | | | AR203: 1, AR256: 1, AR169: 1, AR225: 1, AR210: 1, AR170: 1 L0748: 9, L0731: 7, L0771: 6, L0759: 6, H0013: 5, L0764: 4, |
| | | | | L0747: 4, L0758: 4, H0265: 3, H0039: 3, H0038: 3, L0769: 3, L0766: 3, L0775: 3, H0144: 3, L0755: 3, S0444: 2, S0476: 2, H0318: 2, |
| | | | | H0050: 2, L0471: 2, H0266: 2, L0374: 2, L0649: 2, L0805: 2, L0663: 2, L0664: 2, H0547: 2, S0126: 2, H0670: 2, L0740: 2, L0754: 2, |
| | | | | L0750: 2, L0593: 2, H0667: 2, H0170: 1, H0171: 1, H0685: 1, H0662: 1, S0354: 1, S0360: 1, H0580: 1, H0728: 1, H0151: 1, H0747: 1, |
| | | | | L3388: 1, H0357: 1, H0586: 1, H0331: 1, H0574: 1, H0635: 1, H0575: 1, H0263: 1, H0596: 1, H0545: 1, H0012: 1, H0620: 1, |
| | | | | H0350: 1, H0355: 1, H0510: 1, H0428: 1, H0604: 1, H0031: 1, H0553: 1, S0366: 1, H0040: 1, H0063: 1, H0059: 1, H0560: 1, |
| | | | | H0561: 1, S0440: 1, S0422: 1, H0529: 1, L0640: 1, L0637: 1, L0761: 1, L0772: 1, L0646: 1, L4556: 1, L0774: 1, L0375: 1, L0653: 1, |
| | | | | L0382: 1, L5622: 1, L0793: 1, L4501: 1, H0723: 1, L0352: 1, S0152: 1, S0350: 1, H0521: 1, H0696: 1, S0044: 1, H0627: 1, S0027: 1, |
| | | | | L0749: 1, L0752: 1, H0595: 1, S0436: 1, L0591: 1, L0595: 1, L0361: 1, S0011: 1, S0194: 1, S0276: 1 and H0423: 1. |
| 91 | HLHAL68 | 684216 | 101 | AR089: 14, AR060: 10, AR299: 10, AR185: 8, AR096: 7, AR055: 7, AR039: 6, AR283: 5, AR316: 5, AR313: 5, AR282: 5, |
| | | | | AR240: 4, AR218: 4, AR104: 4, AR300: 3, AR221: 3, AR277: 3, AR219: 3, AR168: 3, AR053: 2, AR207: 2, AR264: 2, AR217: 2, |
| | | | | AR266: 2, AR172: 2, AR171: 1, AR294: 1, AR166: 1, AR291: 1, AR213: 1, AR210: 1, AR199: 1, AR215: 1, AR161: 1, AR230: 1, |
| | | | | AR162: 1, AR163: 1 H0024: 1 |
| 92 | HLIBD68 | 778073 | 102 | AR253: 19, AR313: 9, AR212: 8, AR312: 7, AR053: 7, AR250: 7, AR264: 6, AR161: 6, AR162: 6, AR263: 6, AR309: 6, AR163: 6, |
| | | | | AR165: 6, AR197: 6, AR096: 6, AR166: 6, AR164: 6, AR089: 6, AR173: 6, AR180: 6, AR178: 5, AR198: 5, AR240: 5, AR213: 5, |
| | | | | AR221: 4, AR308: 4, AR311: 4, AR300: 4, AR175: 4, AR229: 4, AR269: 4, AR181: 4, AR242: 4, AR274: 4, AR247: 4, AR168: 4, |
| | | | | AR257: 4, AR193: 4, AR177: 4, AR192: 4, AR183: 4, AR195: 4, AR235: 3, AR270: 3, AR262: 3, AR266: 3, AR282: 3, AR316: 3, |
| | | | | AR225: 3, AR060: 3, AR196: 3, AR275: 3, AR299: 3, AR182: 3, AR277: 3, AR245: 3, AR293: 3, AR207: 3, AR174: 3, AR254: 3, |
| | | | | AR179: 3, AR296: 3, AR261: 3, AR238: 3, AR233: 3, AR185: 3, AR218: 3, AR258: 3, AR268: 3, AR295: 3, AR205: 3, AR226: 3, |
| | | | | AR219: 3, AR271: 3, AR199: 3, AR236: 3, AR289: 3, AR234: 2, AR224: 2, AR267: 2, AR201: 2, AR297: 2, AR287: 2, AR033: 2, |
| | | | | AR188: 2, AR191: 2, AR189: 2, AR286: 2, AR231: 2, AR230: 2, AR255: 2, AR237: 2, AR291: 2, AR200: 2, AR246: 2, AR288: 2, |
| | | | | AR272: 2, AR203: 2, AR239: 2, AR285: 2, AR190: 2, AR290: 2, AR227: 2, AR204: 2, AR222: 2, AR243: 2, AR228: 2, AR104: 2, |
| | | | | AR055: 1, AR216: 1, AR171: 1, AR294: 1, AR170: 1, AR172: 1, AR217: 1, AR211: 1 L0157: 7, L0794: 6, H0040: 4, L0439: 4, |
| | | | | L0758: 4, H0556: 3, L0803: 3, L0005: 2, L0471: 2, H0059: 2, T0004: 2, L0769: 2, L0761: 2, L0805: 2, T0002: 1, H0685: 1, S0134: 1, |
| | | | | S0110: 1, H0176: 1, S0356: 1, S0222: 1, H0441: 1, H0370: 1, H0486: 1, H0014: 1, H0083: 1, H0355: 1, H0286: 1, H0606: 1, |
| | | | | H0163: 1, H0090: 1, H0561: 1, L0521: 1, L0766: 1, L0774: 1, L0809: 1, L0788: 1, L0665: 1, H0539: 1, H0696: 1, L0748: 1, L0749: 1, |
| | | | | L0777: 1, H0543: 1 and H0423: 1. |
| 93 | HLICQ90 | 791828 | 103 | AR263: 79, AR264: 68, AR252: 65, AR246: 63, AR254: 61, AR311: 60, AR308: 54, AR053: 52, AR309: 51, AR312: 46, AR212: 41, |
| | | | | AR205: 40, AR250: 39, AR213: 38, AR096: 37, AR272: 37, AR245: 36, AR218: 36, AR219: 36, AR243: 35, AR039: 32, AR197: 29, |
| | | | | AR240: 26, AR198: 25, AR201: 24, AR274: 22, AR200: 22, AR313: 22, AR271: 21, AR195: 20, AR242: 18, AR221: 18, AR224: 18, |
| | | | | AR174: 18, AR275: 18, AR165: 18, AR316: 17, AR164: 17, AR185: 17, AR104: 17, AR189: 17, AR290: 17, AR222: 17, AR210: 16, |
| | | | | AR223: 16, AR269: 16, AR033: 16, AR188: 16, AR268: 16, AR253: 16, AR211: 16, AR166: 15, AR192: 15, AR295: 15, AR193: 14, |
| | | | | AR173: 14, AR196: 14, AR089: 14, AR175: 14, AR296: 14, AR199: 14, AR172: 14, AR162: 13, AR161: 13, AR207: 13, AR270: 13, |
| | | | | AR190: 13, AR180: 13, AR225: 13, AR177: 13, AR183: 13, AR291: 12, AR299: 12, AR235: 12, AR285: 12, AR163: 12, AR191: 12, |
| | | | | AR247: 12, AR266: 12, AR171: 12, AR178: 11, AR289: 11, AR288: 11, AR060: 11, AR286: 11, AR204: 11, AR300: 11, AR297: 11, |
| | | | | AR267: 10, AR282: 10, AR287: 10, AR255: 10, AR168: 10, AR261: 10, AR257: 10, AR283: 9, AR262: 9, AR203: 9, AR238: 9, |
| | | | | AR215: 9, AR214: 9, AR179: 9, AR170: 8, AR181: 8, AR256: 8, AR293: 8, AR236: 8, AR231: 8, AR229: 7, AR260: 7, AR277: 7 |
| | | | | AR182: 7, AR258: 7, AR176: 7, AR234: 7, AR226: 6, AR294: 6, AR237: 6, AR055: 6, AR169: 5, AR230: 5, AR217: 5, AR232: 5, |
| | | | | AR216: 4, AR239: 4, AR061: 4, AR233: 4, AR227: 3, AR228: 3 H0046: 10, L0748: 6, L0758: 3, L0776: 2, L0742: 2, L0744: 2, |
| | | | | L0750: 2, S0444: 1, S0360: 1, H0619: 1, L0717: 1, H0331: 1, H0013: 1, H0235: 1, H0355: 1, H0687: 1, H0674: 1, H0038: 1, H0623: 1, |
| | | | | L0805: 1, L0809: 1, L0789: 1, L0666: 1, L0663: 1, S0428: 1, H0520: 1, H0539: 1, S0404: 1, L0740: 1, L0749: 1, L0756: 1, S0031: 1 |
| | | | | S0026: 1 and H0008: 1. |
| 94 | HLTHR66 | 699812 | 104 | AR282: 6, AR221: 4, AR235: 3, AR176: 3, AR266: 3, AR215: 3, AR269: 3, AR171: 3, AR270: 3, AR308: 2, AR183: 2, AR196: 2, |
| | | | | AR217: 2, AR172: 2, AR177: 2, AR197: 2, AR222: 2, AR268: 2, AR295: 2, AR228: 2, AR236: 2, AR267: 2, AR188: 2, AR238: 2, |
| | | | | AR261: 2, AR309: 2, AR255: 2, AR296: 2, AR233: 2, AR207: 2, AR291: 2, AR257: 2, AR290: 2, AR232: 2, AR193: 1, AR277: 1, |
| | | | | AR178: 1, AR283: 1, AR089: 1, AR181: 1, AR164: 1, AR203: 1, AR264: 1, AR212: 1, AR166: 1, AR231: 1, AR247: 1, AR293: 1, |
| | | | | AR205: 1, AR055: 1, AR316: 1, AR300: 1, AR175: 1, AR287: 1, AR189: 1, AR168: 1, AR234: 1, AR161: 1, AR174: 1, AR239: 1 |
| | | | | H0036: 2, S0132: 1, S0010: 1, S0250: 1, H0591: 1 and H0130: 1. |
| 95 | HLTIP94 | 1087335 | 105 | AR060: 7, AR055: 7, AR185: 6, AR313: 6, AR218: 5, AR300: 5, AR240: 5, AR089: 4, AR282: 4, AR299: 4, AR283: 4, AR039: 3, |
| | | | | AR096: 3, AR316: 3, AR104: 3, AR277: 3, AR219: 2 H0170: 1, S6026: 1 and H0591: 1. |
| | HLTIP94 | 1035443 | 243 | |
| | HLTIP94 | 1047690 | 244 | |
| 96 | HLWAA17 | 629552 | 106 | AR273: 12, AR184: 12, AR248: 11, AR281: 9, AR183: 8, AR265: 8, AR314: 7, AR280: 7, AR315: 7, AR269: 7, AR268: 6, |
| | | | | AR270: 6, AR241: 6, AR290: 6, AR249: 5, AR298: 5, AR244: 5, AR292: 5, AR274: 4, AR096: 4, AR291: 4, AR271: 4, AR238: 4, |
| | | | | AR251: 4, AR310: 4, AR052: 4, AR309: 4, AR215: 4, AR198: 4, AR182: 4, AR219: 4, AR226: 4, AR312: 4, AR206: 4, AR275: 4, |
| | | | | AR243: 4, AR313: 4, AR267: 4, AR231: 4, AR186: 4, AR218: 4, AR272: 4, AR282: 4, AR253: 4, AR165: 4, AR225: 4, AR164: 3, |
| | | | | AR192: 3, AR296: 3, AR240: 3, AR242: 3, AR039: 3, AR311: 3, AR284: 3, AR232: 3, AR089: 3, AR175: 3, AR237: 3, AR196: 3, |
| | | | | AR207: 3, AR213: 3, AR161: 3, AR061: 3, AR234: 3, AR285: 3, AR247: 3, AR227: 3, AR185: 3, AR216: 3, AR229: 3, AR289: 2, |
| | | | | AR053: 2, AR033: 2, AR277: 2, AR193: 2, AR195: 2, AR205: 2, AR316: 2, AR264: 2, AR212: 2, AR286: 2, AR188: 2, AR293: 2, |
| | | | | AR174: 2, AR297: 2, AR222: 2, AR300: 2, AR191: 2, AR190: 2, AR177: 2, AR288: 2, AR295: 2, AR283: 2, AR162: 2, AR263: 2, |
| | | | | AR055: 2, AR299: 2, AR104: 2, AR261: 2, AR166: 2, AR294: 2, AR266: 2, AR181: 2, AR214: 2, AR189: 2, AR259: 2, AR246: 2, |
| | | | | AR201: 1, AR060: 1, AR257: 1, AR204: 1, AR233: 1, AR199: 1, AR179: 1, AR173: 1, AR200: 1, AR258: 1, AR210: 1, AR252: 1, |
| | | | | AR168: 1, AR256: 1, AR194: 1, AR255: 1, AR236: 1 S0410: 24, L0748: 18, S0436: 12, H0547: 8, L0731: 8, H0556: 7, H0039: 6, |
| | | | | L0666: 6, H0046: 5, H0059: 5, L0775: 5, L0439: 5, L0755: 5, H0622: 4, L0662: 4, L0740: 4, L0751: 4, L0779: 4, H0575: 3, H0553: 3, |
| | | | | H0529: 3, L0769: 3, L0659: 3, L5623: 3, L0588: 3, L0593: 3, S0011: 3, H0255: 2, S0418: 2, S0442: 2, S0046: 2, H0586: 2, S0049: 2, |
| | | | | H0424: 2, H0644: 2, H0560: 2, H0561: 2, S0002: 2, S0426: 2, L0763: 2, L0772: 2, L0646: 2, L0655: 2, L0527: 2, L0518: 2, L0783: 2, |
| | | | | L0809: 2, L0665: 2, L0438: 2, H0519: 2, H0689: 2, H0672: 2, H0555: 2, H0631: 2, S0206: 2, L0757: 2, L0758: 2, L0485: 2, L0608: 2, |
| | | | | L0601: 2, H0543: 2, H0171: 1, H0265: 1, S0040: 1, H0294: 1, T0049: 1, S0134: 1, H0583: 1, H0657: 1, H0484: 1, H0661: 1, H0125: 1, |
| | | | | S0420: 1, S0354: 1, S0358: 1, S0360: 1, S0408: 1, H0580: 1, H0742: 1, S0132: 1, S0476: 1, H0550: 1, H0431: 1, H0592: 1, H0587: 1, |
| | | | | H0333: 1, H0270: 1, H0013: 1, H0599: 1, T0082: 1, H0318: 1, H0251: 1, T0110: 1, H0545: 1, H0150: 1, H0041: 1, H0620: 1, |
| | | | | H0024: 1, H0057: 1, H0014: 1, S0051: 1, H0083: 1, S0024: 1, H0355: 1, H0266: 1, H0271: 1, H0188: 1, S0250: 1, H0328: 1, |
| | | | | H0615: 1, L0483: 1, H0030: 1, H0031: 1, H0111: 1, H0032: 1, H0383: 1, H0674: 1, H0211: 1, L0456: 1, H0068: 1, H0135: 1, |
| | | | | H0040: 1, H0634: 1, H0551: 1, H0412: 1, S0450: 1, H0647: 1, H0646: 1, S0144: 1, S0142: 1, S0344: 1, S0210: 1, L0761: 1, L0372: 1, |
| | | | | L0764: 1, L0767: 1, L0768: 1, L0649: 1, L5574: 1, L0375: 1, L0651: 1, L0784: 1, L0654: 1, L0807: 1, L0515: 1, L0658: 1, L0383: 1, |
| | | | | L0663: 1, L0664: 1, S0006: 1, H0520: 1, H0593: 1, H0682: 1, H0684: 1, H0658: 1, H0670: 1, H0696: 1, S0406: 1, S0027: 1, L0754: 1, |
| | | | | L0747: 1, L0750: 1, L0752: 1, S0434: 1, L0591: 1, L0603: 1, S0106: 1, H0668: 1, H0542: 1 and H0423: 1. |
| 97 | HLYAC95 | 778075 | 107 | AR176: 19, AR182: 14, AR261: 10, AR192: 9, AR262: 9, AR191: 8, AR255: 7, AR296: 7, AR231: 7, AR201: 6, AR232: 6, |
| | | | | AR234: 6, AR233: 6, AR228: 6, AR183: 6, AR246: 6, AR229: 6, AR239: 6, AR200: 6, AR287: 5, AR207: 5, AR291: 5, AR260: 5, |
| | | | | AR294: 5, AR245: 5, AR179: 5, AR243: 5, AR266: 5, AR177: 5, AR168: 5, AR285: 5, AR162: 5, AR289: 5, AR185: 4, AR237: 4, |
| | | | | AR161: 4, AR221: 4, AR236: 4, AR264: 4, AR274: 4, AR227: 4, AR215: 4, AR222: 4, AR223: 4, AR309: 4, AR193: 4, AR290: 4, |
| | | | | AR313: 3, AR196: 3, AR263: 3, AR174: 3, AR204: 3, AR293: 3, AR205: 3, AR189: 3, AR217: 3, AR282: 3, AR033: 3, AR257: 3, |
| | | | | AR288: 3, AR203: 3, AR312: 2, AR267: 2, AR275: 2, AR277: 2, AR216: 2, AR295: 2, AR311: 2, AR258: 2, AR316: 2, AR181: 2, |
| | | | | AR225: 2, AR061: 2, AR214: 2, AR240: 2, AR039: 2, AR299: 2, AR170: 2, AR252: 2, AR199: 2, AR238: 2, AR247: 2, AR256: 2, |
| | | | | AR089: 2, AR224: 2, AR219: 2, AR096: 2, AR211: 2, AR060: 1, AR188: 1, AR175: 1, AR300: 1, AR226: 1, AR173: 1, AR286: 1, |
| | | | | AR269: 1 H0445: 1 |
| 98 | HMADK33 | 561941 | 108 | AR283: 32, AR096: 20, AR089: 18, AR218: 17, AR104: 17, AR277: 16, AR039: 16, AR316: 15, AR282: 15, AR055: 13, AR219: 13, |
| | | | | AR060: 13, AR313: 13, AR299: 12, AR252: 9, AR185: 8, AR240: 8, AR300: 8, AR253: 8, AR271: 7, AR245: 6, AR309: 6, |
| | | | | AR215: 6, AR170: 6, A1R198: 6, AR195: 5, AR169: 5, AR053: 5, AR254: 5, AR311: 5, AR214: 5, AR264: 5, AR225: 5, AR223: 5, |
| | | | | AR224: 5, AR197: 5, AR263: 5, AR266: 4, AR217: 4, AR312: 4, AR193: 4, AR308: 4, AR161: 4, AR213: 4, AR162: 4, AR180: 4, |
| | | | | AR212: 4, AR163: 4, AR216: 4, AR168: 4, AR291: 4, AR222: 4, AR295: 4, AR177: 4, AR183: 4, AR165: 4, AR275: 4, AR192: 4, |
| | | | | AR221: 4, AR235: 4, AR261: 4, AR269: 3, AR270: 3, AR176: 3, AR164: 3, AR210: 3, AR288: 3, AR172: 3, AR033: 3, AR205: 3, |
| | | | | AR181: 3, AR246: 3, AR166: 3, AR171: 3, AR175: 3, AR236: 3, AR296: 3, AR285: 3, AR188: 3, AR207: 3, AR247: 3, AR199: 3, |
| | | | | AR201: 3, AR243: 3, AR267: 3, AR297: 3, AR293: 3, AR255: 3, AR182: 3, AR294: 3, AR268: 2, AR286: 2, AR289: 2, AR257: 2, |
| | | | | AR204: 2, AR287: 2, AR258: 2, AR230: 2, AR200: 2, AR173: 2, AR196: 2, AR238: 2, AR274: 2, AR174: 2, AR262: 2, AR189: 2, |
| | | | | AR228: 2, AR179: 2, AR211: 2, AR191: 2, AR231: 2, AR290: 2, AR203: 2, AR232: 2, AR229: 2, AR233: 2, AR190: 2, AR227: 2, |
| | | | | AR272: 2, AR234: 2, AR239: 2, AR178: 2, AR237: 2, AR061: 1, AR226: 1, AR260: 1, AR256: 1 L0438: 9, L0439: 9, L0776: 8, |
| | | | | H0144: 7, L0741: 7, H0271: 6, S0222: 5, L0769: 5, H0052: 4, L0770: 4, L0766: 4, L0659: 4, L0666: 4, L0759: 4, H0295: 3, S0360: 3, |
| | | | | L0370: 3, L0510: 3, H0556: 2, S0007: 2, H0261: 2, L0021: 2, H0046: 2, H0009: 2, S0051: 2, S0366: 2, H0059: 2, L0763: 2, L0784: 2, |
| | | | | L0633: 2, L0783: 2, L0789: 2, L0790: 2, L0792: 2, L0743: 2, L0747: 2, L0749: 2, L0756: 2, L0757: 2, L0758: 2, H0445: 2, L0588: 2, |
| | | | | L0594: 2, L0366: 2, H0265: 1, S6024: 1, H0638: 1, S0376: 1, S0045: 1, H0550: 1, H0370: 1, H0587: 1, N0009: 1, H0013: 1, S0280: 1, |
| | | | | H0599: 1, S0010: 1, S0049: 1, H0545: 1, H0457: 1, H0569: 1, H0012: 1, H0373: 1, H0051: 1, H0510: 1, H0266: 1, H0179: 1, |
| | | | | H0416: 1, H0328: 1, S0036: 1, H0634: 1, H0087: 1, H0412: 1, L0351: 1, S0144: 1, L0638: 1, L0761: 1, L0646: 1, L0662: 1, L0767: 1, |
| | | | | L0768: 1, L0388: 1, L0803: 1, L0774: 1, L0775: 1, L0375: 1, L0651: 1, L0806: 1, L0515: 1, L0809: 1, S0428: 1, S0216: 1, H0699: 1, |
| | | | | H0693: 1, H0684: 1, H0648: 1, H0710: 1, H0521: 1, H0696: 1, H0187: 1, H0436: 1, S0028: 1, L0750: 1, L0779: 1, L0731: 1, S0260: 1, |
| | | | | H0595: 1, L0599: 1, S0192: 1, S0276: 1, H0542: 1 and H0352: 1. |
| 99 | HMAMI15 | 1352406 | 109 | AR060: 14, AR283: 13, AR055: 10, AR277: 9, AR282: 9, AR185: 9, AR104: 9, AR300: 8, AR096: 8, AR316: 8, AR299: 8, |
| | | | | AR218: 7, AR219: 7, AR039: 7, AR313: 6, AR240: 6, AR089: 6 H0624: 2, S0354: 2, S0442: 1, S0444: 1, S0278: 1, S0222: 1, |
| | | | | H0586: 1, L0021: 1, H0036: 1, H0031: 1, L0769: 1, L0804: 1, L0774: 1, H0658: 1, H0521: 1, S0406: 1, L0748: 1 and S0462: 1. |
| | HMAMI15 | 1049263 | 245 | |
| 100 | HMCFY13 | 635301 | 110 | AR176: 8, AR161: 6, AR162: 6, AR266: 6, AR181: 6, AR269: 6, AR163: 6, AR172: 6, AR228: 5, AR267: 5, AR233: 5, AR055: 5, |
| | | | | AR268: 5, AR229: 5, AR165: 5, AR309: 5, AR238: 4, AR183: 4, AR178: 4, AR164: 4, AR237: 4, AR215: 4, AR257: 4, AR182: 4, |
| | | | | AR166: 4, AR168: 4, AR217: 4, AR236: 4, AR239: 4, AR261: 4, AR180: 4, AR291: 4, AR222: 4, AR290: 4, AR270: 4, AR170: 4, |
| | | | | AR177: 4, AR060: 4, AR240: 4, AR282: 4, AR247: 4, AR272: 4, AR275: 4, AR293: 4, AR288: 4, AR171: 3, AR169: 3, AR255: 3, |
| | | | | AR289: 3, AR179: 3, AR203: 3, AR175: 3, AR264: 3, AR231: 3, AR061: 3, AR225: 3, AR191: 3, AR294: 3, AR287: 3, AR230: 3, |
| | | | | AR223: 3, AR226: 3, AR173: 3, AR232: 3, AR234: 3, AR200: 3, AR214: 3, AR216: 3, AR221: 3, AR224: 3, AR196: 3, AR227: 3, |
| | | | | AR104: 3, AR199: 3, AR285: 3, AR262: 3, AR277: 2, AR311: 2, AR297: 2, AR300: 2, AR096: 2, AR190: 2, AR295: 2, AR174: 2, |
| | | | | AR188: 2, AR316: 2, AR286: 2, AR312: 2, AR089: 2, AR263: 2, AR189: 2, AR313: 2, AR258: 2, AR274: 2, AR053: 2, AR283: 2, |
| | | | | AR299: 2, AR185: 1, AR296: 1, AR204: 1, AR260: 1, AR210: 1, AR039: 1, AR218: 1 L0800: 2, H0550: 1, H0497: 1, S0344: 1, |
| | | | | L0769: 1, L0789: 1 and L0749: 1. |
| 101 | HMDAB56 | 560676 | 111 | AR168: 4, AR161: 4, AR162: 4, AR212: 4, AR163: 4, AR223: 4, AR222: 4, AR216: 4, AR172: 4, AR264: 3, AR214: 3, AR282: 3, |
| | | | | AR311: 3, AR170: 3, AR270: 3, AR250: 3, AR277: 3, AR225: 3, AR299: 3, AR165: 3, AR313: 3, AR164: 3, AR171: 2, AR253: 2, |
| | | | | AR096: 2, AR199: 2, AR201: 2, AR308: 2, AR221: 2, AR263: 2, AR039: 2, AR312: 2, AR205: 2, AR196: 2, AR294: 2, AR213: 2, |
| | | | | AR267: 2, AR217: 2, AR290: 2, AR274: 2, AR166: 2, AR291: 2, AR295: 2, AR089: 2, AR193: 2, AR191: 1, AR316: 1, AR033: 1, |
| | | | | AR240: 1, AR269: 1, AR215: 1, AR266: 1, AR224: 1, AR195: 1, AR293: 1, AR283: 1, AR183: 1, AR189: 1, AR262: 1, AR104: 1, |
| | | | | AR210: 1, AR247: 1, AR239: 1, AR268: 1, AR169: 1 L0809: 2, H0346: 1, H0271: 1, L0774: 1 and L0532: 1. |
| 102 | HMEED18 | 560775 | 112 | AR252: 37, AR186: 32, AR250: 28, AR169: 20, AR254: 19, AR207: 17, AR244: 17, AR195: 16, AR033: 15, AR284: 15, AR291: 15, |
| | | | | AR214: 14, AR165: 14, AR298: 14, AR264: 14, AR222: 14, AR181: 13, AR245: 13, AR164: 13, AR197: 13, AR246: 13, AR224: 13, |
| | | | | AR168: 13, AR253: 13, AR308: 13, AR223: 12, AR269: 12, AR285: 12, AR225: 12, AR263: 12, AR212: 12, AR172: 12, AR166: 12, |
| | | | | AR274: 12, AR311: 12, AR162: 12, AR161: 12, AR163: 12, AR184: 12, AR215: 11, AR192: 11, AR221: 11, AR052: 11, AR240: 11, |
| | | | | AR104: 11, AR183: 11, AR171: 11, AR174: 11, AR170: 11, AR176: 11, AR173: 11, AR193: 11, AR206: 11, AR201: 11, AR053: 11, |
| | | | | AR292: 10, AR288: 10, AR231: 10, AR237: 10, AR261: 10, AR235: 10, AR295: 10, AR273: 10, AR236: 10, AR293: 10, AR312: 10, |
| | | | | AR216: 10, AR205: 10, AR217: 10, AR178: 10, AR196: 10, AR213: 10, AR061: 10, AR270: 9, AR243: 9, AR290: 9, AR282: 9, |
| | | | | AR191: 9, AR182: 9, AR268: 9, AR188: 9, AR286: 9, AR267: 9, AR189: 9, AR238: 9, AR229: 9, AR177: 9, AR226: 9, AR294: 9, |
| | | | | AR242: 9, AR289: 9, AR175: 8, AR299: 8, AR310: 8, AR266: 8, AR199: 8, AR096: 8, AR247: 8, AR039: 8, AR297: 8, AR180: 8, |
| | | | | AR227: 8, AR296: 8, AR271: 8, AR190: 8, AR313: 8, AR309: 8, AR194: 7, AR287: 7, AR234: 7, AR185: 7, AR275: 7, AR248: 7, |
| | | | | AR210: 7, AR200: 7, AR089: 7, AR277: 7, AR300: 7, AR316: 7, AR204: 7, AR272: 7, AR179: 7, AR251: 6, AR259: 6, AR262: 6, |
| | | | | AR211: 6, AR255: 6, AR241: 6, AR314: 6, AR055: 6, AR198: 6, AR256: 6, AR257: 6, AR258: 6, AR232: 6, AR203: 5, AR239: 5, |
| | | | | AR233: 5, AR060: 5, AR219: 5, AR218: 5, AR202: 5, AR249: 5, AR280: 5, AR260: 4, AR228: 4, AR283: 4, AR315: 4, AR230: 4, |
| | | | | AR265: 2 L0439: 20, L0157: 8, L0794: 8, L0805: 6, H0739: 5, L0731: 5, L0804: 4, S0222: 3, L0766: 3, L0438: 3, S0356: 2, |
| | | | | H0741: 2, H0050: 2, S0144: 2, L0803: 2, L0655: 2, L0663: 2, L2654: 2, H0521: 2, H0522: 2, L0749: 2, L0779: 2, L0777: 2, L0755: 2, |
| | | | | L0759: 2, H0265: 1, S6024: 1, S0116: 1, S0444: 1, H0733: 1, S6026: 1, H0298: 1, H0592: 1, L0622: 1, H0486: 1, H0013: 1, H0250: 1, |
| | | | | H0635: 1, H0156: 1, S0474: 1, H0581: 1, H0046: 1, L0471: 1, H0012: 1, H0014: 1, H0373: 1, H0073: 1, H0266: 1, S0336: 1, |
| | | | | H0039: 1, S0036: 1, H0040: 1, H0634: 1, H0551: 1, H0561: 1, S0438: 1, S0440: 1, H0529: 1, L0769: 1, L0764: 1, L0662: 1, L0774: 1, |
| | | | | L0775: 1, L0809: 1, L0790: 1, L0792: 1, L0666: 1, L0664: 1, L0665: 1, L0709: 1, L2653: 1, H0144: 1, H0659: 1, H0658: 1, H0670: 1, |
| | | | | S0378: 1, H0696: 1, H0555: 1, H0576: 1, S0028: 1, L0745: 1, L0747: 1, L0780: 1, S0434: 1, S0436: 1 and H0668: 1. |
| 103 | HMEFT54 | 520307 | 113 | AR060: 7, AR055: 7, AR039: 6, AR282: 6, AR223: 5, AR196: 5, AR089: 5, AR104: 5, AR269: 5, AR176: 5, AR161: 5, AR162: 5, |
| | | | | AR182: 5, AR240: 5, AR163: 5, AR096: 5, AR231: 5, AR165: 5, AR299: 5, AR235: 5, AR207: 5, AR309: 5, AR204: 5, AR313: 4, |
| | | | | AR243: 4, AR181: 4, AR246: 4, AR316: 4, AR164: 4, AR166: 4, AR300: 4, AR277: 4, AR183: 4, AR170: 4, AR228: 4, AR185: 4, |
| | | | | AR229: 4, AR255: 4, AR274: 4, AR221: 4, AR266: 4, AR283: 4, AR247: 4, AR290: 4, AR236: 4, AR261: 4, AR294: 4, AR267: 3, |
| | | | | AR192: 3, AR270: 3, AR178: 3, AR175: 3, AR169: 3, AR234: 3, AR179: 3, AR275: 3, AR262: 3, AR252: 3, AR199: 3, AR197: 3, |
| | | | | AR219: 3, AR253: 3, AR233: 3, AR061: 3, AR264: 3, AR271: 3, AR180: 3, AR173: 3, AR263: 3, AR295: 3, AR193: 3, AR177: 3, |
| | | | | AR288: 3, AR237: 3, AR257: 3, AR268: 3, AR195: 3, AR174: 3, AR286: 3, AR218: 3, AR191: 3, AR239: 3, AR171: 3, AR203: 3, |
| | | | | AR250: 3, AR285: 3, AR287: 3, AR188: 3, AR216: 3, AR297: 3, AR296: 3, AR189: 3, AR201: 3, AR214: 2, AR226: 2, AR291: 2, |
| | | | | AR293: 2, AR232: 2, AR222: 2, AR200: 2, AR190: 2, AR258: 2, AR168: 2, AR227: 2, AR312: 2, AR289: 2, AR308: 2, AR260: 2, |
| | | | | AR230: 2, AR272: 1, AR210: 1, AR311: 1, AR242: 1, AR256: 1, AR033: 1 L0757: 3, L0662: 2, H0686: 1, S0444: 1, H0266: 1, |
| | | | | L0055: 1, L0763: 1, L0800: 1, L0764: 1, L0768: 1, L0805: 1, L0653: 1, L0666: 1, H0690: 1, H0672: 1, L0751: 1, L0777: 1 and |
| | | | | L0758: 1. |
| 104 | HMEGF92 | 520304 | 114 | AR233: 16, AR178: 13, AR176: 13, AR261: 11, AR061: 11, AR257: 11, AR104: 11, AR228: 10, AR182: 10, AR196: 10, AR238: 10, |
| | | | | AR299: 9, AR236: 9, AR293: 8, AR239: 8, AR190: 8, AR231: 8, AR288: 8, AR232: 8, AR291: 8, AR161: 8, AR229: 8, AR162: 8, |
| | | | | AR175: 8, AR163: 7, AR258: 7, AR269: 7, AR185: 7, AR266: 7, AR033: 7, AR174: 7, AR164: 6, AR200: 6, AR191: 6, AR300: 6, |
| | | | | AR250: 6, AR237: 6, AR234: 6, AR267: 6, AR287: 6, AR166: 6, AR165: 5, AR294: 5, AR203: 5, AR286: 5, AR268: 5, AR262: 5, |
| | | | | AR055: 5, AR247: 5, AR226: 5, AR285: 5, AR179: 5, AR295: 5, AR089: 5, AR230: 5, AR216: 5, AR316: 5, AR183: 5, AR252: 5, |
| | | | | AR297: 5, AR181: 5, AR060: 5, AR271: 5, AR168: 4, AR172: 4, AR193: 4, AR240: 4, AR264: 4, AR227: 4, AR180: 4, AR207: 4, |
| | | | | AR309: 4, AR188: 4, AR296: 4, AR177: 4, AR275: 4, AR289: 4, AR189: 4, AR255: 3, AR198: 3, AR235: 3, AR215: 3, AR260: 3, |
| | | | | AR171: 3, AR246: 3, AR096: 3, AR313: 3, AR290: 3, AR214: 3, AR221: 3, AR274: 2, AR039: 2, AR217: 2, AR197: 2, AR210: 2, |
| | | | | AR204: 2, AR312: 2, AR213: 2, AR277: 2, AR272: 2, AR225: 2, AR199: 2, AR222: 2, AR211: 2, AR053: 2, AR308: 2, AR311: 2, |
| | | | | AR224: 2, AR173: 1, AR270: 1, AR282: 1, AR283: 1, AR201: 1 H0266: 1, L0438: 1 and L0439: 1. |
| 105 | HMSDL37 | 973996 | 115 | AR169: 5, AR282: 3, AR170: 3, AR225: 2, AR257: 2, AR224: 2, AR205: 2, AR171: 2, AR294: 2, AR217: 1, AR309: 1, AR168: 1, |
| | | | | AR261: 1, AR173: 1, AR163: 1, AR222: 1, AR178: 1 L0517: 2, S0050: 1, H0014: 1, H0510: 1, H0040: 1, H0264: 1, S0002: 1, |
| | | | | S0374: 1 and L0758: 1. |
| | HMSDL37 | 895429 | 246 | |
| | HMSDL37 | 904241 | 247 | |
| | HMSDL37 | 750927 | 248 | |
| 106 | HMSFI26 | 560229 | 116 | AR313: 11, AR039: 11, AR089: 8, AR096: 8, AR218: 8, AR176: 7, AR162: 7, AR219: 7, AR163: 7, AR161: 7, AR299: 6, AR165: 6, |
| | | | | AR300: 6, AR221: 6, AR180: 6, AR060: 6, AR164: 6, AR166: 6, AR207: 6, AR197: 6, AR178: 6, AR182: 6, AR175: 6, AR316: 6, |
| | | | | AR181: 6, AR173: 6, AR055: 6, AR104: 5, AR266: 5, AR247: 5, AR270: 5, AR204: 5, AR229: 5, AR185: 5, AR240: 5, AR183: 5, |
| | | | | AR312: 5, AR177: 5, AR309: 5, AR196: 4, AR257: 4, AR297: 4, AR263: 4, AR243: 4, AR277: 4, AR193: 4, AR293: 4, AR225: 4, |
| | | | | AR269: 4, AR264: 4, AR179: 4, AR275: 4, AR282: 4, AR226: 4, AR261: 4, AR205: 4, AR242: 4, AR268: 4, AR294: 4, AR291: 4, |
| | | | | AR233: 4, AR267: 4, AR262: 4, AR296: 4, AR238: 3, AR234: 3, AR228: 3, AR289: 3, AR174: 3, AR199: 3, AR237: 3, AR231: 3, |
| | | | | AR271: 3, AR195: 3, AR258: 3, AR236: 3, AR245: 3, AR198: 3, AR215: 3, AR283: 3, AR227: 3, AR239: 3, AR212: 3, AR203: 3, |
| | | | | AR170: 3, AR246: 3, AR286: 3, AR290: 3, AR285: 3, AR230: 3, AR295: 3, AR053: 3, AR201: 3, AR191: 3, AR255: 2, AR308: 2, |
| | | | | AR272: 2, AR168: 2, AR033: 2, AR287: 2, AR217: 2, AR188: 2, AR222: 2, AR200: 2, AR061: 2, AR232: 2, AR189: 2, AR216: 2, |
| | | | | AR288: 2, AR213: 2, AR274: 2, AR311: 2, AR171: 2, AR260: 2, AR190: 2, AR224: 2, AR210: 1, AR169: 1 S0002: 1 |
| 107 | HMVBS81 | 639203 | 117 | AR215: 22, AR223: 21, AR214: 21, AR172: 20, AR225: 18, AR210: 16, AR170: 15, AR291: 14, AR199: 14, AR169: 14, AR224: 14, |
| | | | | AR216: 14, AR171: 14, AR222: 13, AR168: 13, AR211: 12, AR221: 11, AR165: 11, AR231: 11, AR164: 11, AR166: 11, AR219: 11, |
| | | | | AR289: 10, AR217: 10, AR061: 10, AR266: 10, AR235: 10, AR285: 10, AR283: 9, AR196: 9, AR218: 9, AR162: 9, AR243: 9, |
| | | | | AR161: 9, AR261: 9, AR089: 9, AR163: 9, AR238: 8, AR255: 8, AR240: 8, AR200: 8, AR297: 8, AR296: 8, AR254: 8, AR287: 8, |
| | | | | AR269: 8, AR245: 8, AR295: 7, AR290: 7, AR039: 7, AR246: 7, AR316: 7, AR282: 7, AR257: 7, AR247: 7, AR189: 7, AR226: 7, |
| | | | | AR173: 7, AR188: 7, AR239: 7, AR183: 7, AR232: 7, AR180: 7, AR178: 7, AR256: 7, AR203: 6, AR250: 6, AR288: 6, AR267: 6, |
| | | | | AR193: 6, AR234: 6, AR268: 6, AR237: 6, AR182: 6, AR176: 6, AR229: 6, AR293: 6, AR262: 6, AR175: 6, AR270: 5, AR212: 5, |
| | | | | AR177: 5, AR205: 5, AR258: 5, AR272: 5, AR198: 5, AR236: 5, AR191: 5, AR185: 5, AR104: 5, AR312: 5, AR311: 5, AR174: 5, |
| | | | | AR300: 5, AR060: 5, AR286: 5, AR195: 5, AR260: 5, AR233: 4, AR294: 4, AR263: 4, AR190: 4, AR308: 4, AR228: 4, AR230: 4, |
| | | | | AR299: 4, AR179: 4, AR277: 4, AR227: 4, AR271: 4, AR096: 4, AR213: 4, AR275: 4, AR055: 4, AR264: 4, AR313: 4, AR201: 4, |
| | | | | AR053: 4, AR197: 3, AR033: 3, AR181: 3, AR242: 3, AR253: 3, AR274: 3, AR207: 2, AR204: 2, AR309: 2, AR252: 2, AR192: 1 |
| | | | | H0544: 4, L0775: 3, L0748: 3, H0265: 2, H0046: 2, T0010: 2, H0424: 2, L0769: 2, L0771: 2, L0774: 2, L0659: 2, L0382: 2, H0696: 2, |
| | | | | L0750: 2, L0755: 2, L0731: 2, L0757: 2, L0758: 2, L0608: 2, H0685: 1, S0040: 1, S0114: 1, S0218: 1, L0785: 1, H0341: 1, S0212: 1, |
| | | | | H0484: 1, H0662: 1, S0360: 1, H0411: 1, H0592: 1, L0623: 1, H0156: 1, H0253: 1, H0263: 1, H0204: 1, H0150: 1, H0050: 1, |
| | | | | H0012: 1, H0510: 1, H0606: 1, L0055: 1, S0364: 1, H0124: 1, H0163: 1, H0090: 1, H0087: 1, H0413: 1, H0494: 1, H0509: 1, |
| | | | | S0210: 1, L0770: 1, L0764: 1, L0773: 1, L0794: 1, L0766: 1, L0658: 1, L0666: 1, S0126: 1, S3012: 1, S3014: 1, L0745: 1, L0747: 1, |
| | | | | L0777: 1, S0031: 1, S0434: 1, L0605: 1, L0366: 1 and H0543: 1. |
| 108 | HMWDC28 | 460487 | 118 | AR245: 5, AR176: 5, AR198: 5, AR161: 5, AR162: 4, AR204: 4, AR163: 4, AR207: 4, AR271: 4, AR309: 4, AR266: 4, AR164: 4, |
| | | | | AR165: 4, AR166: 4, AR181: 3, AR221: 3, AR039: 3, AR252: 3, AR089: 3, AR254: 3, AR216: 3, AR182: 3, AR291: 3, AR177: 3, |
| | | | | AR257: 3, AR224: 3, AR264: 3, AR312: 3, AR268: 3, AR238: 3, AR275: 3, AR296: 3, AR178: 2, AR179: 2, AR228: 2, AR215: 2, |
| | | | | AR267: 2, AR196: 2, AR229: 2, AR295: 2, AR311: 2, AR055: 2, AR233: 2, AR282: 2, AR096: 2, AR270: 2, AR288: 2, AR269: 2, |
| | | | | AR191: 2, AR246: 2, AR289: 2, AR053: 2, AR185: 2, AR300: 2, AR285: 2, AR286: 2, AR234: 2, AR236: 2, AR262: 2, AR316: 2, |
| | | | | AR174: 2, AR255: 2, AR231: 2, AR313: 2, AR060: 2, AR201: 2, AR294: 2, AR287: 2, AR237: 2, AR243: 2, AR212: 2, AR240: 2, |
| | | | | AR226: 2, AR232: 2, AR290: 2, AR283: 2, AR061: 2, AR261: 2, AR308: 2, AR168: 2, AR247: 2, AR203: 2, AR239: 2, AR253: 2, |
| | | | | AR175: 2, AR277: 2, AR217: 2, AR293: 1, AR190: 1, AR272: 1, AR193: 1, AR227: 1, AR297: 1, AR213: 1, AR230: 1, AR258: 1, |
| | | | | AR188: 1, AR180: 1, AR033: 1, AR195: 1, AR199: 1, AR183: 1, AR211: 1, AR235: 1 H0341: 2, L0803: 2, L0439: 2, L0747: 2, |
| | | | | S0376: 1, S0360: 1, S0222: 1, H0674: 1, H0038: 1, L0655: 1, L0809: 1, L0666: 1, L0754: 1, L0756: 1, L0757: 1 and L0591: 1. |
| 109 | HMWFT65 | 562063 | 119 | AR176: 6, AR183: 6, AR313: 6, AR173: 6, AR269: 6, AR290: 6, AR180: 6, AR247: 5, AR189: 5, AR162: 5, AR191: 5, AR161: 5, |
| | | | | AR163: 5, AR039: 5, AR266: 5, AR274: 4, AR182: 4, AR055: 4, AR060: 4, AR165: 4, AR190: 4, AR263: 4, AR164: 4, AR270: 4, |
| | | | | AR166: 4, AR264: 4, AR089: 4, AR267: 4, AR096: 4, AR175: 4, AR181: 4, AR168: 3, AR255: 3, AR170: 3, AR257: 3, AR169: 3, |
| | | | | AR179: 3, AR293: 3, AR196: 3, AR178: 3, AR217: 3, AR268: 3, AR275: 3, AR262: 3, AR291: 3, AR233: 3, AR229: 3, AR240: 3, |
| | | | | AR237: 3, AR238: 3, AR218: 3, AR185: 3, AR228: 3, AR294: 3, AR171: 3, AR250: 3, AR316: 3, AR300: 3, AR188: 3, AR104: 3, |
| | | | | AR174: 3, AR231: 3, AR296: 3, AR225: 3, AR224: 3, AR177: 3, AR261: 3, AR236: 3, AR061: 3, AR239: 3, AR226: 3, AR299: 3, |
| | | | | AR285: 3, AR288: 3, AR277: 2, AR198: 2, AR272: 2, AR193: 2, AR201: 2, AR221: 2, AR200: 2, AR287: 2, AR230: 2, AR203: 2, |
| | | | | AR286: 2, AR232: 2, AR289: 2, AR227: 2, AR214: 2, AR199: 2, AR295: 2, AR172: 2, AR297: 2, AR033: 2, AR282: 2, AR308: 2, |
| | | | | AR219: 2, AR223: 2, AR258: 2, AR283: 2, AR271: 2, AR311: 1, AR260: 1, AR216: 1, AR234: 1, AR312: 1, AR245: 1, AR211: 1, |
| | | | | AR212: 1, AR235: 1, AR195: 1 H0341: 1 |
| 110 | HNEEE24 | 553558 | 120 | AR161: 8, AR162: 8, AR163: 8, AR055: 6, AR165: 5, AR166: 5, AR164: 5, AR060: 5, AR172: 5, AR313: 4, AR169: 4, AR053: 4, |
| | | | | AR269: 4, AR275: 4, AR089: 4, AR242: 4, AR263: 4, AR176: 4, AR264: 4, AR192: 4, AR240: 3, AR182: 3, AR205: 3, AR039: 3, |
| | | | | AR235: 3, AR096: 3, AR212: 3, AR257: 3, AR268: 3, AR282: 3, AR195: 3, AR270: 3, AR104: 3, AR200: 3, AR197: 3, AR228: 3, |
| | | | | AR185: 3, AR173: 3, AR316: 3, AR299: 3, AR233: 3, AR236: 3, AR189: 3, AR191: 3, AR283: 3, AR311: 3, AR300: 2, AR309: 2, |
| | | | | AR267: 2, AR255: 2, AR229: 2, AR225: 2, AR245: 2, AR290: 2, AR295: 2, AR193: 2, AR308: 2, AR312: 2, AR277: 2, AR266: 2, |
| | | | | AR237: 2, AR221: 2, AR199: 2, AR274: 2, AR238: 2, AR224: 2, AR262: 2, AR213: 2, AR181: 2, AR216: 2, AR180: 2, AR218: 2, |
| | | | | AR261: 2, AR061: 2, AR247: 2, AR289: 2, AR178: 2, AR287: 2, AR175: 2, AR293: 2, AR297: 2, AR177: 2, AR190: 2, AR285: 2, |
| | | | | AR226: 2, AR231: 2, AR219: 2, AR183: 2, AR179: 2, AR239: 2, AR196: 2, AR291: 2, AR217: 2, AR201: 2, AR288: 2, AR227: 1, |
| | | | | AR272: 1, AR258: 1, AR294: 1, AR296: 1, AR232: 1, AR214: 1, AR260: 1, AR168: 1, AR174: 1, AR171: 1 L0747: 2, L0758: 2, |
| | | | | H0580: 1 and H0179: 1. |
| 111 | HNFFC43 | 753337 | 121 | AR273: 25, AR052: 20, AR274: 13, AR218: 10, AR241: 9, AR248: 9, AR277: 8, AR265: 8, AR186: 8, AR249: 8, AR312: 8, |
| | | | | AR271: 8, AR313: 8, AR309: 7, AR183: 7, AR253: 7, AR299: 7, AR244: 6, AR251: 6, AR292: 6, AR219: 6, AR175: 6, AR310: 6, |
| | | | | AR096: 5, AR213: 5, AR185: 5, AR053: 5, AR275: 5, AR202: 5, AR282: 5, AR039: 4, AR269: 4, AR270: 4, AR206: 4, AR055: 4, |
| | | | | AR177: 4, AR225: 4, AR089: 4, AR060: 4, AR192: 4, AR293: 4, AR243: 4, AR280: 4, AR247: 4, AR300: 4, AR104: 4, AR033: 4, |
| | | | | AR240: 4, AR061: 3, AR204: 3, AR217: 3, AR246: 3, AR316: 3, AR268: 3, AR165: 3, AR180: 3, AR198: 3, AR315: 3, AR164: 3, |
| | | | | AR166: 3, AR184: 3, AR205: 3, AR264: 3, AR294: 3, AR314: 3, AR284: 3, AR290: 3, AR295: 2, AR168: 2, AR259: 2, AR267: 2, |
| | | | | AR256: 2, AR179: 2, AR161: 2, AR221: 2, AR257: 2, AR163: 2, AR162: 2, AR170: 2, AR291: 2, AR200: 2, AR236: 2, AR262: 2, |
| | | | | AR193: 2, AR283: 2, AR174: 2, AR197: 2, AR298: 2, AR233: 1, AR181: 1, AR222: 1, AR287: 1, AR258: 1, AR195: 1, AR194: 1, |
| | | | | AR229: 1, AR196: 1, AR182: 1, AR173: 1, AR234: 1, AR239: 1, AR235: 1, AR230: 1, AR216: 1 H0521: 6, H0036: 2, H0052: 2, |
| | | | | H0271: 2, H0551: 2, H0543: 2, H0265: 1, H0556: 1, S0354: 1, H0392: 1, H0581: 1, H0063: 1, H0059: 1, H0494: 1, H0561: 1, |
| | | | | L3829: 1, H0520: 1, H0522: 1, S0436: 1, L0595: 1, H0506: 1 and L0600: 1. |
| 112 | HNFIY77 | 634551 | 122 | AR241: 9, AR313: 8, AR194: 8, AR186: 7, AR192: 7, AR242: 7, AR202: 7, AR206: 7, AR161: 7, AR162: 7, AR163: 6, AR204: 6, |
| | | | | AR246: 6, AR229: 6, AR165: 6, AR238: 6, AR164: 6, AR166: 5, AR271: 5, AR198: 5, AR251: 5, AR089: 5, AR207: 5, AR197: 5, |
| | | | | AR052: 5, AR309: 5, AR312: 5, AR274: 5, AR243: 5, AR061: 4, AR185: 4, AR292: 4, AR177: 4, AR298: 4, AR245: 4, AR226: 4, |
| | | | | AR273: 4, AR240: 4, AR053: 4, AR225: 4, AR286: 4, AR233: 4, AR272: 4, AR300: 4, AR096: 4, AR293: 4, AR247: 4, AR264: 4, |
| | | | | AR205: 4, AR039: 4, AR234: 4, AR275: 3, AR237: 3, AR231: 3, AR195: 3, AR253: 3, AR060: 3, AR228: 3, AR201: 3, AR182: 3, |
| | | | | AR284: 3, AR282: 3, AR174: 3, AR227: 3, AR269: 3, AR193: 3, AR199: 3, AR289: 3, AR033: 3, AR294: 3, AR239: 3, AR285: 3, |
| | | | | AR290: 3, AR184: 3, AR270: 3, AR265: 3, AR308: 3, AR181: 3, AR248: 3, AR232: 3, AR296: 3, AR291: 3, AR299: 3, AR297: 3, |
| | | | | AR252: 3, AR259: 3, AR277: 3, AR310: 2, AR263: 2, AR230: 2, AR258: 2, AR288: 2, AR224: 2, AR257: 2, AR295: 2, AR203: 2, |
| | | | | AR213: 2, AR179: 2, AR055: 2, AR268: 2, AR104: 2, AR200: 2, AR316: 2, AR255: 2, AR212: 2, AR267: 2, AR215: 2, AR266: 2, |
| | | | | AR183: 2, AR173: 2, AR175: 2, AR191: 2, AR287: 2, AR217: 2, AR222: 2, AR172: 2, AR196: 2, AR281: 1, AR189: 1, AR283: 1, |
| | | | | AR218: 1, AR219: 1, AR214: 1, AR256: 1, AR262: 1, AR262: 1, AR216: 1, L0539: 1, S0442: 1, H0619: 1, H0581: 1, T0010: 1, |
| | | | | H416: 1, H0622: 1, H0131: 1, H0521: 1 and H0653: 1. |
| 113 | HNFJF07 | 577013 | 123 | AR104: 20, AR055: 15, AR060: 14, AR229: 13, AR283: 12, AR039: 11, AR313: 10, AR089: 10, AR096: 9, AR316: 9, AR161: 8, |
| | | | | AR162: 8, AR299: 8, AR163: 8, AR165: 7, AR282: 7, AR164: 7, AR166: 7, AR185: 6, AR240: 6, AR300: 6, AR274: 6, AR219: 5, |
| | | | | AR053: 5, AR277: 5, AR263: 5, AR309: 5, AR275: 5, AR172: 5, AR181: 4, AR250: 4, AR257: 4, AR236: 4, AR177: 4, AR218: 4, |
| | | | | AR261: 4, AR228: 4, AR171: 4, AR266: 4, AR183: 4, AR178: 4, AR238: 4, AR264: 4, AR225: 4, AR235: 4, AR255: 3, AR215: 3, |
| | | | | AR293: 3, AR286: 3, AR233: 3, AR179: 3, AR222: 3, AR234: 3, AR262: 3, AR237: 3, AR247: 3, AR182: 3, AR287: 3, AR168: 3, |
| | | | | AR272: 3, AR294: 3, AR288: 3, AR170: 3, AR196: 3, AR174: 3, AR269: 3, AR175: 3, AR297: 3, AR268: 3, AR226: 3, AR223: 3, |
| | | | | AR201: 3, AR311: 3, AR239: 3, AR290: 3, AR200: 3, AR231: 3, AR308: 2, AR195: 2, AR199: 2, AR061: 2, AR227: 2, AR216: 2, |
| | | | | AR285: 2, AR312: 2, AR296: 2, AR271: 2, AR232: 2, AR180: 2, AR270: 2, AR291: 2, AR258: 2, AR230: 2, AR191: 2, AR289: 2, |
| | | | | AR224: 1, AR246: 1, AR295: 1, AR188: 1, AR193: 1, AR217: 1, AR242: 1, AR214: 1 H0271: 2, H0581: 1, H0051: 1, H0163: 1, |
| | | | | L0599: 1 and H0422: 1. |
| 114 | HNGFR31 | 553552 | 124 | AR060: 6, AR252: 6, AR055: 6, AR053: 5, AR161: 4, AR162: 4, AR254: 4, AR163: 4, AR309: 4, AR089: 4, AR235: 3, AR236: 3, |
| | | | | AR104: 3, AR283: 3, AR165: 3, AR216: 3, AR164: 3, AR300: 3, AR166: 3, AR181: 3, AR185: 3, AR177: 3, AR228: 3, AR263: 3, |
| | | | | AR299: 3, AR183: 3, AR267: 3, AR039: 3, AR182: 3, AR176: 2, AR197: 2, AR240: 2, AR201: 2, AR277: 2, AR289: 2, AR291: 2, |
| | | | | AR282: 2, AR2662: 2, AR293: 2, AR3162: 2, AR255: 2, AR0962: 2, AR238: 2, AR180: 2, AR257: 2, AR175: 2, AR218: 2, AR233: 2, |
| | | | | AR215: 2, AR2825: 2, AR264: 2, AR231: 2, AR239: 2, AR274: 2, AR229: 2, AR207: 2, AR262: 2, AR179: 2, AR286: 2, AR173: 2, |
| | | | | AR288: 2, AR188: 2, AR198: 2, AR214: 2, AR192: 2, AR287: 2, AR190: 2, AR261: 2, AR237: 2, AR211: 2, AR297: 2, AR313: 2, |
| | | | | AR178: 2, AR200: 2, AR247: 2, AR227: 2, AR270: 2, AR203: 2, AR269: 2, AR226: 2, AR290: 2, AR191: 2, AR212: 1, AR219: 1, |
| | | | | AR268: 1, AR271: 1, AR275: 1, AR272: 1, AR189: 1, AR168: 1, AR294: 1, AR312: 1, AR174: 1, AR224: 1, AR234: 1, AR061: 1, |
| | | | | AR193: 1, AR213: 1, AR258: 1, AR311: 1, AR222: 1 S0052: 1 |
| 115 | HNGIJ31 | 519120 | 125 | AR231: 7, AR039: 6, AR221: 5, AR313: 4, AR096: 4, AR180: 4, AR055: 4, AR060: 4, AR104: 4, AR161: 4, AR162: 4, AR163: 4, |
| | | | | AR275: 4, AR183: 4, AR089: 3, AR205: 3, AR300: 3, AR272: 3, AR246: 3, AR274: 3, AR225: 3, AR269: 3, AR181: 3, AR299: 3, |
| | | | | AR165: 3, AR164: 3, AR166: 3, AR175: 3, AR173: 3, AR191: 3, AR198: 3, AR277: 3, AR185: 3, AR270: 3, AR182: 3, AR240: 3, |
| | | | | AR033: 3, AR316: 3, AR176: 2, AR267: 2, AR261: 2, AR204: 2, AR266: 2, AR257: 2, AR291: 2, AR216: 2, AR218: 2, AR264: 2, |
| | | | | AR214: 2, AR219: 2, AR222: 2, AR224: 2, AR195: 2, AR189: 2, AR190: 2, AR201: 2, AR283: 2, AR288: 2, AR196: 2, AR309: 2, |
| | | | | AR179: 2, AR285: 2, AR271: 2, AR290: 2, AR263: 2, AR296: 2, AR282: 2, AR172: 2, AR178: 2, AR293: 2, AR193: 2, AR226: 2, |
| | | | | AR233: 1, AR199: 1, AR312: 1, AR234: 1, AR228: 1, AR247: 1, AR230: 1, AR061: 1, AR255: 1, AR188: 1, AR238: 1, AR287: 1, |
| | | | | AR268: 1, AR236: 1, AR217: 1, AR258: 1, AR262: 1, AR174: 1, AR295: 1, AR192: 1 |
| 116 | HNGJE50 | 561568 | 126 | AR039: 15, AR313: 14, AR161: 14, AR162: 14, AR163: 13, AR165: 12, AR166: 11, AR164: 11, AR089: 11, AR096: 10, AR178: 9, |
| | | | | AR229: 9, AR299: 8, AR300: 8, AR198: 8, AR060: 7, AR185: 7, AR245: 7, AR271: 7, AR182: 7, AR176: 7, AR053: 7, AR180: 7, |
| | | | | AR316: 7, AR247: 7, AR240: 6, AR173: 6, AR274: 6, AR055: 6, AR266: 6, AR181: 6, AR257: 6, AR175: 6, AR179: 6, AR183: 6, |
| | | | | AR233: 6, AR252: 6, AR239: 6, AR204: 6, AR282: 6, AR177: 6, AR104: 5, AR174: 5, AR277: 5, AR309: 5, AR264: 5, AR269: 5, |
| | | | | AR228: 5, AR243: 5, AR197: 5, AR207: 5, AR312: 5, AR226: 5, AR275: 5, AR192: 5, AR219: 5, AR196: 5, AR270: 5, AR212: 5, |
| | | | | AR293: 5, AR237: 5, AR238: 5, AR253: 5, AR236: 5, AR218: 4, AR268: 4, AR262: 4, AR261: 4, AR267: 4, AR234: 4, AR246: 4, |
| | | | | AR201: 4, AR283: 4, AR258: 4, AR191: 4, AR296: 4, AR171: 4, AR254: 4, AR213: 4, AR272: 4, AR230: 4, AR308: 4, AR255: 4, |
| | | | | AR231: 4, AR235: 4, AR289: 3, AR199: 3, AR061: 3, AR291: 3, AR297: 3, AR286: 3, AR288: 3, AR205: 3, AR222: 3, AR263: 3, |
| | | | | AR227: 3, AR193: 3, AR200: 3, AR214: 3, AR290: 3, AR033: 3, AR294: 3, AR203: 3, AR256: 2, AR295: 2, AR285: 2, AR232: 2, |
| | | | | AR287: 2, AR189: 2, AR195: 2, AR224: 2, AR225: 2, AR216: 2, AR188: 2, AR311: 2, AR260: 2, AR190: 2, AR242: 2, AR210: 1, |
| | | | | AR172: 1, AR170: 1, AR211: 1 S0052: 1 |
| 117 | HNGND37 | 839224 | 127 | AR161: 7, AR162: 7, AR163: 7, AR176: 6, AR055: 5, AR181: 5, AR180: 5, AR269: 5, AR266: 5, AR178: 5, AR267: 5, AR268: 5, |
| | | | | AR229: 5, AR060: 4, AR104: 4, AR271: 4, AR222: 4, AR261: 4, AR225: 4, AR224: 4, AR228: 4, AR165: 4, AR089: 4, AR177: 4, |
| | | | | AR257: 4, AR233: 4, AR053: 4, AR300: 4, AR164: 4, AR182: 4, AR270: 4, AR033: 4, AR166: 4, AR264: 4, AR183: 3, AR168: 3, |
| | | | | AR289: 3, AR235: 3, AR237: 3, AR236: 3, AR290: 3, AR255: 3, AR061: 3, AR296: 3, AR238: 3, AR231: 3, AR277: 3, AR250: 3, |
| | | | | AR239: 3, AR240: 3, AR175: 3, AR226: 3, AR293: 3, AR230: 3, AR221: 3, AR170: 3, AR287: 3, AR174: 3, AR185: 3, AR179: 3, |
| | | | | AR216: 3, AR291: 3, AR316: 3, AR288: 3, AR297: 3, AR294: 3, AR169: 3, AR282: 3, AR227: 2, AR191: 2, AR096: 2, AR283: 2, |
| | | | | AR309: 2, AR214: 2, AR247: 2, AR234: 2, AR262: 2, AR263: 2, AR232: 2, AR196: 2, AR299: 2, AR286: 2, AR275: 2, AR171: 2, |
| | | | | AR203: 2, AR285: 2, AR173: 2, AR295: 2, AR189: 2, AR204: 2, AR274: 2, AR190: 2, AR312: 2, AR172: 2, AR246: 2, AR200: 2, |
| | | | | AR217: 2, AR308: 2, AR211: 2, AR258: 2, AR188: 2, AR201: 2, AR260: 2, AR313: 2, AR272: 2, AR039: 2, AR243: 1, AR218: 1, |
| | | | | AR219: 1, AR210: 1, AR199: 1, AR213: 1, AR205: 1, AR256: 1, AR252: 1, L0749: 4, L0439: 3, H0100: 2, L0770: 2, L0776: 2, |
| | | | | H0556: 1, H0638: 1, H0441: 1, T0010: 1, H0687: 1, L0055: 1, L0769: 1, L0809: 1, S0428: 1, H0522: 1, H0694: 1, L0758: 1, L0589: 1 |
| | | | | and L0592: 1. |
| 118 | HNGOI12 | 1041375 | 128 | AR225: 30, AR223: 24, AR221: 18, AR224: 17, AR215: 14, AR168: 12, AR214: 9, AR222: 9, AR216: 9, AR171: 8, AR217: 8, |
| | | | | AR266: 8, AR172: 8, AR176: 7, AR269: 7, AR182: 7, AR288: 7, AR180: 7, AR245: 7, AR289: 6, AR161: 6, AR162: 6, AR204: 6, |
| | | | | AR255: 6, AR197: 6, AR270: 6, AR183: 6, AR297: 6, AR163: 6, AR178: 6, AR268: 6, AR181: 6, AR282: 6, AR236: 5, AR231: 5, |
| | | | | AR039: 5, AR293: 5, AR207: 5, AR179: 5, AR294: 5, AR201: 5, AR295: 5, AR198: 5, AR169: 5, AR240: 5, AR286: 5, AR261: 5, |
| | | | | AR229: 5, AR165: 5, AR205: 5, AR170: 4, AR285: 4, AR233: 4, AR309: 4, AR290: 4, AR257: 4, AR177: 4, AR055: 4, AR175: 4, |
| | | | | AR246: 4, AR300: 4, AR287: 4, AR256: 4, AR173: 4, AR243: 4, AR271: 4, AR267: 4, AR235: 4, AR264: 4, AR164: 4, AR263: 4, |
| | | | | AR247: 4, AR313: 4, AR166: 4, AR277: 4, AR262: 4, AR060: 4, AR238: 4, AR260: 4, AR191: 4, AR291: 4, AR316: 4, AR258: 4, |
| | | | | AR239: 4, AR053: 4, AR296: 4, AR228: 4, AR174: 4, AR250: 4, AR199: 4, AR096: 3, AR192: 3, AR230: 3, AR237: 3, AR196: 3, |
| | | | | AR193: 3, AR234: 3, AR283: 3, AR104: 3, AR203: 3, AR190: 3, AR272: 3, AR200: 3, AR253: 3, AR189: 3, AR061: 3, AR185: 3, |
| | | | | AR311: 3, AR275: 3, AR226: 3, AR299: 3, AR089: 3, AR227: 3, AR188: 3, AR312: 3, AR232: 2, AR219: 2, AR274: 2, AR033: 2, |
| | | | | AR195: 2, AR212: 2, AR213: 2, AR211: 2, AR218: 1, AR242: 1, AR210: 1, AR308: 1 S0428: 1 |
| | HNGOI12 | 838184 | 249 | |
| | HNGOI12 | 839283 | 250 | |
| 119 | HNHEU93 | 634851 | 129 | AR313: 24, AR173: 20, AR162: 16, AR161: 16, AR163: 16, AR165: 15, AR247: 14, AR164: 14, AR166: 14, AR175: 13, AR258: 13, |
| | | | | AR242: 13, AR293: 12, AR257: 11, AR270: 10, AR262: 10, AR178: 10, AR299: 10, AR300: 10, AR240: 9, AR269: 9, AR176: 9, |
| | | | | AR233: 9, AR254: 9, AR229: 9, AR264: 9, AR180: 9, AR196: 9, AR179: 9, AR312: 9, AR199: 9, AR177: 9, AR182: 9, AR181: 9, |
| | | | | AR275: 8, AR296: 8, AR183: 8, AR294: 8, AR238: 8, AR191: 8, AR197: 8, AR193: 8, AR297: 8, AR274: 7, AR234: 7, AR253: 7, |
| | | | | AR174: 7, AR226: 7, AR053: 7, AR260: 7, AR267: 7, AR285: 7, AR268: 7, AR237: 7, AR286: 6, AR089: 6, AR189: 6, AR290: 6, |
| | | | | AR252: 6, AR291: 6, AR287: 6, AR096: 6, AR204: 6, AR231: 6, AR192: 6, AR255: 6, AR228: 6, AR250: 6, AR188: 6, AR288: 6, |
| | | | | AR185: 6, AR033: 6, AR263: 6, AR261: 6, AR198: 6, AR282: 6, AR309: 6, AR272: 6, AR203: 5, AR212: 5, AR239: 5, AR245: 5, |
| | | | | AR207: 5, AR295: 5, AR289: 5, AR266: 5, AR195: 5, AR308: 5, AR190: 5, AR218: 5, AR200: 5, AR277: 5, AR201: 4, AR256: 4, |
| | | | | AR219: 4, AR230: 4, AR227: 4, AR316: 4, AR246: 4, AR213: 4, AR271: 4, AR236: 4, AR215: 4, AR243: 4, AR232: 3, AR061: 3, |
| | | | | AR205: 3, AR039: 3, AR224: 3, AR060: 3, AR172: 3, AR225: 2, AR210: 2, AR211: 2, AR104: 2, AR171: 2, AR221: 2, AR223: 2, |
| | | | | AR311: 2, AR283: 2, AR216: 1, AR055: 1 S0053: 1 |
| 120 | HNHFM14 | 664507 | 130 | AR270: 26, AR273: 17, AR052: 17, AR186: 12, AR290: 12, AR309: 11, AR269: 10, AR268: 9, AR313: 8, AR175: 7, AR267: 7, |
| | | | | AR184: 6, AR312: 6, AR183: 5, AR213: 5, AR298: 5, AR219: 5, AR274: 4, AR218: 4, AR293: 4, AR249: 4, AR194: 4, AR089: 4, |
| | | | | AR185: 4, AR162: 3, AR161: 3, AR265: 3, AR163: 3, AR198: 3, AR060: 3, AR261: 3, AR104: 3, AR096: 3, AR204: 3, AR192: 3, |
| | | | | AR207: 3, AR251: 3, AR282: 3, AR172: 3, AR217: 3, AR236: 3, AR264: 3, AR181: 3, AR221: 3, AR225: 2, AR195: 2, AR240: 2, |
| | | | | AR248: 2, AR246: 2, AR231: 2, AR299: 2, AR171: 2, AR271: 2, AR239: 2, AR176: 2, AR201: 2, AR228: 2, AR277: 2, AR295: 2, |
| | | | | AR316: 2, AR178: 2, AR179: 2, AR061: 2, AR216: 2, AR224: 2, AR291: 2, AR193: 2, AR033: 2, AR287: 2, AR234: 2, AR300: 1, |
| | | | | AR310: 1, AR233: 1, AR296: 1, AR286: 1, AR238: 1, AR237: 1, AR174: 1, AR262: 1, AR285: 1, AR191: 1, AR294: 1, AR227: 1, |
| | | | | AR255: 1, AR257: 1, AR297: 1, AR247: 1, AR232: 1, AR289: 1 L0747: 5, H0619: 4, S0406: 4, L0439: 4, L0777: 4, H0617: 2, |
| | | | | L0770: 2, L0769: 2, L0803: 2, L0438: 2, L3827: 2, S0328: 2, L0749: 2, L0779: 2, H0265: 1, L3643: 1, H0484: 1, S0418: 1, H0747: 1, |
| | | | | L3388: 1, H0618: 1, S0010: 1, H0052: 1, H0570: 1, H0012: 1, H0014: 1, H0510: 1, H0288: 1, H0622: 1, S0366: 1, H0040: 1, |
| | | | | H0623: 1, L0351: 1, T0042: 1, L0761: 1, L0764: 1, L0767: 1, L0805: 1, L0655: 1, L0809: 1, S0053: 1, L3828: 1, H0520: 1, H0435: 1, |
| | | | | H0659: 1, S3014: 1, L0743: 1, L0756: 1, L0758: 1 and H0136: 1. |
| 121 | HNHNB29 | 895462 | 131 | AR313: 23, AR254: 22, AR162: 20, AR161: 20, AR163: 19, AR173: 17, AR165: 16, AR164: 16, AR166: 15, AR229: 14, AR176: 13, |
| | | | | AR178: 13, AR247: 13, AR268: 13, AR271: 13, AR269: 12, AR183: 12, AR193: 12, AR180: 12, AR175: 11, AR096: 11, AR270: 11, |
| | | | | AR257: 11, AR214: 11, AR293: 11, AR170: 11, AR181: 10, AR267: 10, AR179: 10, AR182: 10, AR300: 10, AR253: 10, AR192: 10, |
| | | | | AR197: 10, AR174: 9, AR258: 9, AR226: 9, AR242: 9, AR275: 9, AR262: 9, AR240: 9, AR296: 9, AR274: 9, AR238: 9, AR266: 9, |
| | | | | AR169: 8, AR312: 8, AR233: 8, AR250: 8, AR264: 8, AR199: 8, AR196: 8, AR246: 8, AR309: 8, AR245: 8, AR237: 8, AR189: 8, |
| | | | | AR272: 8, AR291: 8, AR195: 8, AR204: 7, AR172: 7, AR089: 7, AR243: 7, AR191: 7, AR290: 7, AR177: 7, AR297: 7, AR286: 7, |
| | | | | AR234: 7, AR198: 7, AR255: 6, AR277: 6, AR235: 6, AR239: 6, AR228: 6, AR294: 6, AR190: 6, AR201: 6, AR033: 6, AR203: 6, |
| | | | | AR215: 6, AR308: 6, AR231: 6, AR289: 6, AR188: 5, AR236: 5, AR185: 5, AR039: 5, AR285: 5, AR261: 5, AR230: 5, AR282: 5, |
| | | | | AR168: 5, AR299: 5, AR225: 5, AR288: 5, AR205: 5, AR287: 5, AR295: 5, AR053: 5, AR060: 5, AR263: 5, AR227: 4, AR213: 4, |
| | | | | AR200: 4, AR316: 4, AR224: 4, AR311: 4, AR212: 4, AR260: 4, AR061: 4, AR171: 4, AR219: 4, AR211: 3, AR256: 3, AR232: 3, |
| | | | | AR252: 3, AR218: 3, AR222: 3, AR207: 3, AR055: 3, AR221: 3, AR216: 3, AR104: 2, AR223: 2, AR217: 1, AR210: 1 S0216: 1 |
| 122 | HNHOD46 | 843488 | 132 | AR039: 32, AR313: 28, AR096: 21, AR089: 19, AR299: 16, AR185: 11, AR277: 11, AR316: 11, AR300: 10, AR104: 10, AR060: 9, |
| | | | | AR219: 8, AR218: 8, AR240: 7, AR055: 7, AR161: 6, AR162: 6, AR173: 6, AR282: 6, AR163: 6, AR165: 6, AR164: 6, AR166: 6, |
| | | | | AR183: 5, AR247: 5, AR270: 5, AR229: 5, AR176: 4, AR175: 4, AR181: 4, AR269: 4, AR257: 4, AR179: 4, AR238: 4, AR283: 4, |
| | | | | AR178: 4, AR196: 4, AR293: 4, AR309: 4, AR262: 4, AR268: 4, AR250: 4, AR182: 4, AR174: 3, AR236: 3, AR199: 3, AR177: 3, |
| | | | | AR213: 3, AR230: 3, AR234: 3, AR171: 3, AR291: 3, AR296: 3, AR233: 3, AR258: 3, AR255: 3, AR286: 3, AR180: 3, AR191: 3, |
| | | | | AR189: 3, AR237: 3, AR297: 3, AR312: 3, AR261: 3, AR294: 3, AR295: 3, AR168: 3, AR053: 3, AR263: 3, AR226: 3, AR274: 3, |
| | | | | AR287: 2, AR225: 2, AR188: 2, AR231: 2, AR308: 2, AR203: 2, AR267: 2, AR239: 2, AR285: 2, AR289: 2, AR033: 2, AR169: 2, |
| | | | | AR275: 2, AR227: 2, AR266: 2, AR264: 2, AR290: 2, AR224: 2, AR200: 2, AR190: 2, AR243: 2, AR311: 2, AR228: 2, AR212: 2, |
| | | | | AR222: 2, AR216: 2, AR272: 1, AR172: 1, AR211: 1, AR260: 1, AR235: 1, AR061: 1 S0216: 1 |
| 123 | HNTBI26 | 1310821 | 133 | AR195: 19, AR214: 19, AR194: 18, AR225: 16, AR223: 16, AR164: 16, AR165: 16, AR281: 16, AR166: 15, AR224: 15, AR172: 15, |
| | | | | AR216: 15, AR215: 15, AR202: 15, AR161: 14, AR162: 14, AR222: 14, AR221: 14, AR199: 14, AR217: 14, AR280: 14, AR244: 14, |
| | | | | AR169: 14, AR163: 14, AR206: 14, AR171: 13, AR168: 13, AR315: 13, AR207: 12, AR235: 12, AR211: 12, AR170: 12, AR246: 12, |
| | | | | AR268: 11, AR192: 11, AR265: 11, AR197: 11, AR263: 11, AR314: 11, AR196: 11, AR311: 10, AR243: 10, AR241: 10, AR205: 10, |
| | | | | AR245: 10, AR264: 10, AR297: 9, AR242: 9, AR288: 9, AR198: 9, AR212: 9, AR191: 9, AR308: 9, AR213: 8, AR269: 8, AR273: 8, |
| | | | | AR309: 8, AR270: 8, AR310: 8, AR290: 8, AR053: 8, AR272: 8, AR275: 8, AR200: 8, AR252: 8, AR189: 8, AR173: 8, AR261: 8, |
| | | | | AR289: 8, AR180: 8, AR089: 8, AR210: 7, AR312: 7, AR188: 7, AR251: 7, AR234: 7, AR183: 7, AR284: 7, AR271: 7, AR236: 7, |
| | | | | AR190: 7, AR238: 7, AR295: 7, AR181: 7, AR253: 7, AR291: 7, AR282: 7, AR248: 7, AR247: 7, AR266: 7, AR285: 7, AR283: 7, |
| | | | | AR193: 7, AR177: 7, AR182: 7, AR033: 7, AR250: 7, AR174: 7, AR204: 7, AR176: 6, AR240: 6, AR274: 6, AR254: 6, AR052: 6, |
| | | | | AR060: 6, AR286: 6, AR239: 6, AR175: 6, AR249: 6, AR299: 6, AR277: 6, AR257: 6, AR218: 6, AR316: 6, AR061: 5, AR298: 5, |
| | | | | AR096: 5, AR287: 5, AR178: 5, AR300: 5, AR255: 5, AR231: 5, AR185: 5, AR296: 5, AR203: 5, AR313: 5, AR292: 5, AR201: 5, |
| | | | | AR232: 5, AR039: 5, AR186: 5, AR227: 5, AR055: 5, AR219: 5, AR258: 5, AR267: 5, AR294: 5, AR262: 5, AR293: 4, AR229: 4, |
| | | | | AR179: 4, AR260: 4, AR226: 4, AR237: 4, AR228: 4, AR233: 4, AR104: 4, AR184: 3, AR230: 3, AR256: 3, AR259: 2 H0124: 23, |
| | | | | L0774: 4, L0740: 3, S0212: 2, S0360: 2, L3388: 2, L0659: 2, L0757: 2, S0436: 2, H0170: 1, H0713: 1, H0580: 1, S0045: 1, H0393: 1, |
| | | | | S0220: 1, H0333: 1, H0643: 1, H0574: 1, H0013: 1, S0280: 1, H0581: 1, H0544: 1, H0150: 1, H0059: 1, H0509: 1, L0369: 1, L0640: 1, |
| | | | | L0521: 1, L0363: 1, L0775: 1, L0654: 1, L0776: 1, L0559: 1, L0384: 1, L0790: 1, L0664: 1, L2258: 1, L2260: 1, H0519: 1, S0027: 1, |
| | | | | S0206: 1, L0747: 1, L0749: 1, L0780: 1, L0731: 1, L0759: 1 and H0542: 1. |
| | HNTBI26 | 796807 | 251 | |
| | HNTBI26 | 590738 | 252 | |
| 124 | HNTBL27 | 545534 | 134 | AR218: 6, AR240: 5, AR282: 5, AR277: 5, AR316: 5, AR096: 4, AR219: 4, AR185: 4, AR104: 4, AR300: 3, AR299: 3, AR060: 3, |
| | | | | AR283: 3, AR055: 3, AR313: 3, AR089: 3, AR039: 3 L0794: 3, L0663: 2, S0360: 1, H0042: 1, H0253: 1, H0150: 1, H0633: 1, |
| | | | | S0142: 1, H0538: 1, L0804: 1, L0790: 1, L791: 1, L0666: 1, L0664: 1, L0665: 1, H0519: 1, L0747: 1, L0749: 1, L0779: 1, L0779: 1, L0777: 1, |
| | | | | L0755: 1 and L0731: 1. |
| 125 | HNTCE26 | 1160395 | 135 | AR291: 7, AR164: 5, AR295: 5, AR296: 5, AR285: 5, AR166: 5, AR165: 5, AR170: 4, AR297: 4, AR287: 4, AR162: 4, AR286: 4, |
| | | | | AR161: 4, AR235: 4, AR311: 4, AR257: 4, AR288: 4, AR223: 4, AR225: 4, AR053: 4, AR089: 4, AR060: 4, AR308: 4, AR261: 4, |
| | | | | AR169: 4, AR262: 4, AR176: 4, AR096: 4, AR264: 4, AR266: 3, AR283: 3, AR199: 3, AR246: 3, AR178: 3, AR289: 3, AR214: 3, |
| | | | | AR267: 3, AR205: 3, AR269: 3, AR312: 3, AR245: 3, AR263: 3, AR195: 3, AR196: 3, AR175: 3, AR255: 3, AR293: 3, AR236: 3, |
| | | | | AR270: 3, AR277: 3, AR173: 3, AR104: 3, AR272: 3, AR188: 3, AR183: 3, AR294: 3, AR268: 3, AR224: 3, AR258: 3, AR242: 3, |
| | | | | AR182: 3, AR238: 3, AR189: 3, AR193: 3, AR316: 3, AR191: 3, AR180: 3, AR174: 3, AR163: 2, AR197: 2, AR253: 2, AR210: 2, |
| | | | | AR290: 2, AR200: 2, AR190: 2, AR203: 2, AR217: 2, AR247: 2, AR181: 2, AR299: 2, AR185: 2, AR260: 2, AR211: 2, AR282: 2, |
| | | | | AR313: 2, AR309: 2, AR254: 2, AR256: 2, AR033: 2, AR201: 2, AR179: 2, AR213: 2, AR227: 2, AR171: 2, AR237: 2, AR168: 2, |
| | | | | AR222: 2, AR300: 2, AR240: 2, AR243: 2, AR234: 2, AR274: 2, AR219: 2, AR204: 2, AR239: 2, AR218: 2, AR233: 1, AR231: 1, |
| | | | | AR177: 1, AR216: 1, AR172: 1, AR212: 1, AR055: 1, AR061: 1, AR230: 1, AR232: 1, AR226: 1 H0580: 5, L0754: 5, H0615: 4, |
| | | | | L0805: 4, L0748: 4, L0731: 4, H0031: 3, S0440: 3, L0659: 3, L0758: 3, L2346: 2, S0278: 2, L0804: 2, L0809: 2, H0547: 2, H0352: 2, |
| | | | | H0657: 1, H0656: 1, S0418: 1, S0442: 1, S0444: 1, L3649: 1, H0741: 1, H0645: 1, H0574: 1, H0486: 1, L3521: 1, H0013: 1, S0010: 1, |
| | | | | H0327: 1, H0046: 1, L0041: 1, H0510: 1, S0214: 1, H0328: 1, H0030: 1, H0553: 1, H0644: 1, H0032: 1, S0344: 1, S0002: 1, L0369: 1, |
| | | | | L0667: 1, L0364: 1, L0794: 1, L0803: 1, L0775: 1, L0776: 1, L0789: 1, L0666: 1, L0663: 1, L2653: 1, L0438: 1, H0519: 1, H0670: 1, L0744: 1, |
| | | | | L0439: 1, L0747: 1, L0779: 1, L0591: 1 and L3374: 1. |
| | HNTCE26 | 853373 | 253 | |
| 126 | HNTNI01 | 1352285 | 136 | AR207: 15, AR263: 12, AR169: 11, AR311: 11, AR212: 10, AR198: 10, AR264: 10, AR235: 10, AR252: 9, AR168: 9, AR223: 9, |
| | | | | AR224: 9, AR089: 9, AR053: 8, AR215: 8, AR172: 8, AR161: 8, AR162: 8, AR214: 8, AR222: 8, AR163: 8, AR309: 8, AR165: 8, |
| | | | | AR205: 8, AR192: 8, AR164: 8, AR170: 8, AR221: 7, AR166: 7, AR216: 7, AR242: 7, AR282: 7, AR308: 7, AR195: 7, AR171: 7, |
| | | | | AR039: 7, AR213: 7, AR261: 7, AR312: 7, AR245: 6, AR254: 6, AR295: 6, AR225: 6, AR033: 6, AR197: 6, AR288: 6, AR217: 6, |
| | | | | AR060: 5, AR196: 5, AR274: 5, AR096: 5, AR246: 5, AR271: 5, AR291: 5, AR193: 5, AR316: 5, AR286: 5, AR277: 5, AR283: 5, |
| | | | | AR299: 5, AR178: 5, AR272: 5, AR275: 5, AR236: 4, AR243: 4, AR285: 4, AR240: 4, AR104: 4, AR313: 4, AR185: 4, AR176: 4, |
| | | | | AR296: 4, AR297: 4, AR204: 4, AR287: 4, AR210: 4, AR055: 4, AR177: 4, AR253: 4, AR183: 4, AR181: 4, AR290: 4, AR247: 4, |
| | | | | AR269: 4, AR258: 4, AR289: 4, AR257: 4, AR201: 4, AR174: 3, AR238: 3, AR200: 3, AR262: 3, AR300: 3, AR175: 3, AR199: 3, |
| | | | | AR294: 3, AR255: 3, AR188: 3, AR268: 3, AR180: 3, AR293: 3, AR211: 3, AR173: 3, AR266: 3, AR250: 3, AR270: 3, AR061: 3, |
| | | | | AR189: 3, AR179: 3, AR267: 3, AR239: 3, AR182: 3, AR190: 3, AR227: 2, AR231: 2, AR234: 2, AR256: 2, AR219: 2, AR237: 2, |
| | | | | AR203: 2, AR191: 2, AR229: 2, AR226: 2, AR230: 2, AR232: 2, AR260: 2, AR233: 2, AR218: 2, AR228: 1 L0747: 5, H0545: 3, |
| | | | | H0520: 3, L0439: 3, L0803: 2, L0790: 2, H0547: 2, L0740: 2, L0751: 2, L0779: 2, L0759: 2, L0593: 2, H0170: 1, S0005: 1, H0485: 1, |
| | | | | H0013: 1, L0564: 1, L0770: 1, L0794: 1, L0809: 1, H0519: 1, S0378: 1, L0756: 1, L0777: 1 and H0667: 1. |
| | HNTNI01 | 699848 | 254 | |
| 127 | HODDF13 | 684307 | 137 | AR312: 21, AR308: 20, AR205: 19, AR253: 19, AR250: 19, AR309: 19, AR264: 18, AR311: 16, AR212: 16, AR213: 15, AR218: 14, |
| | | | | AR096: 14, AR272: 14, AR313: 14, AR263: 14, AR161: 13, AR162: 13, AR163: 13, AR165: 13, AR164: 12, AR175: 12, AR053: 12, |
| | | | | AR219: 12, AR089: 12, AR166: 12, AR246: 12, AR178: 11, AR270: 11, AR254: 11, AR271: 11, AR173: 11, AR274: 10, AR039: 10, |
| | | | | AR192: 10, AR174: 10, AR176: 10, AR282: 10, AR216: 10, AR189: 10, AR193: 10, AR183: 9, AR221: 9, AR268: 9, AR191: 9, |
| | | | | AR252: 9, AR210: 9, AR245: 9, AR172: 9, AR269: 9, AR290: 9, AR197: 9, AR180: 9, AR242: 8, AR217: 8, AR224: 8, AR182: 8, |
| | | | | AR316: 8, AR215: 8, AR293: 8, AR181: 8, AR288: 8, AR179: 8, AR267: 8, AR060: 8, AR190: 8, AR171: 7, AR247: 7, AR201: 7, |
| | | | | AR297: 7, AR195: 7, AR240: 7, AR185: 7, AR222: 7, AR177: 7, AR199: 6, AR170: 6, AR295: 6, AR291: 6, AR188: 6, AR198: 6, |
| | | | | AR211: 6, AR243: 6, AR266: 6, AR275: 6, AR104: 6, AR299: 6, AR204: 6, AR229: 5, AR300: 5, AR237: 5, AR294: 5, AR169: 5, |
| | | | | AR285: 5, AR225: 5, AR033: 5, AR296: 5, AR286: 5, AR287: 5, AR261: 5, AR238: 5, AR168: 5, AR289: 4, AR231: 4, AR230: 4, |
| | | | | AR223: 4, AR277: 4, AR214: 4, AR226: 4, AR228: 4, AR203: 4, AR239: 4, AR196: 4, AR255: 4, AR234: 4, AR235: 4, AR233: 4, |
| | | | | AR262: 4, AR260: 3, AR236: 3, AR257: 3, AR061: 3, AR256: 3, AR232: 3, AR200: 3, AR227: 3, AR258: 3, AR283: 3, AR055: 2, |
| | | | | AR207: 2 H0328: 1 |
| 128 | HODDN92 | 422913 | 138 | AR161: 4, AR162: 4, AR163: 4, AR192: 4, AR165: 4, AR308: 4, AR264: 4, AR176: 4, AR311: 3, AR164: 3, AR309: 3, AR166: 3, |
| | | | | AR312: 3, AR213: 3, AR214: 3, AR193: 3, AR225: 3, AR313: 3, AR096: 3, AR089: 3, AR270: 3, AR172: 3, AR235: 3, AR299: 2, |
| | | | | AR201: 2, AR291: 2, AR104: 2, AR269: 2, AR195: 2, AR294: 2, AR169: 2, AR215: 2, AR290: 2, AR224: 2, AR173: 2, AR060: 2, |
| | | | | AR288: 2, AR282: 2, AR285: 2, AR271: 2, AR185: 2, AR175: 2, AR039: 2, AR275: 2, AR277: 2, AR211: 2, AR268: 2, AR316: 2, |
| | | | | AR190: 2, AR267: 2, AR274: 2, AR272: 2, AR171: 2, AR287: 2, AR221: 2, AR237: 2, AR189: 1, AR289: 1, AR217: 1, AR300: 1, |
| | | | | AR247: 1, AR255: 1, AR262: 1, AR257: 1, AR183: 1, AR286: 1, AR236: 1, AR256: 1, AR293: 1, AR254: 1, AR295: 1, AR178: 1, |
| | | | | AR297: 1, AR238: 1, AR296: 1, AR168: 1 L0758: 14, H0457: 10, H0556: 5, S0114: 5, L0748: 5, L0756: 5, H0657: 4, H0620: 4, |
| | | | | H0328: 4, H0591: 4, L0754: 4, L0779: 4, H0589: 3, L0532: 3, H0445: 3, H0341: 2, H0580: 2, H0208: 2, H0619: 2, H0486: 2, |
| | | | | H0013: 2, L0471: 2, H0024: 2, H0673: 2, H0674: 2, H0038: 2, H0264: 2, H0561: 2, L0803: 2, L0606: 2, L0519: 2, S0216: 2, L0749: 2, |
| | | | | L0777: 2, L0589: 2, H0171: 1, S0218: 1, S0212: 1, H0255: 1, H0305: 1, S0358: 1, S0444: 1, H0329: 1, L0717: 1, S0222: 1, H0370: 1, |
| | | | | H0438: 1, H0586: 1, H0574: 1, H0632: 1, H0581: 1, H0310: 1, H0544: 1, H0009: 1, H0123: 1, H0350: 1, S0003: 1, H0252: 1, |
| | | | | H0615: 1, H0644: 1, H0598: 1, S0036: 1, H0090: 1, H0063: 1, S0038: 1, H0625: 1, H0538: 1, L0373: 1, L0794: 1, L0650: 1, L0774: 1, |
| | | | | L0805: 1, L0559: 1, L0558: 1, L0659: 1, L0526: 1, H0144: 1, H0520: 1, H0696: 1, S0206: 1, S0434: 1, S0011: 1, S0026: 1, H0543: 1 |
| | | | | and H0423: 1. |
| 129 | HOFMQ33 | 1184465 | 139 | AR205: 90, AR212: 77, AR245: 75, AR274: 68, AR272: 67, AR216: 65, AR246: 62, AR252: 60, AR308: 59, AR213: 59, AR214: 55, |
| | | | | AR312: 54, AR215: 54, AR197: 50, AR309: 50, AR254: 50, AR053: 50, AR217: 49, AR171: 49, AR221: 49, AR195: 48, AR311: 45, |
| | | | | AR225: 45, AR223: 44, AR264: 44, AR170: 44, AR189: 44, AR199: 43, AR210: 43, AR263: 43, AR168: 43, AR247: 43, AR243: 41, |
| | | | | AR224: 41, AR172: 41, AR253: 40, AR222: 40, AR169: 39, AR164: 37, AR250: 37, AR174: 37, AR271: 36, AR166: 36, AR198: 36, |
| | | | | AR165: 36, AR201: 34, AR188: 34, AR162: 34, AR190: 32, AR163: 32, AR242: 32, AR161: 32, AR204: 29, AR193: 28, AR173: 27, |
| | | | | AR192: 26, AR313: 26, AR236: 25, AR291: 24, AR177: 24, AR275: 24, AR290: 24, AR256: 23, AR039: 22, AR262: 22, AR096: 22, |
| | | | | AR191: 22, AR240: 22, AR219: 22, AR200: 22, AR185: 22, AR179: 21, AR218: 21, AR089: 21, AR211: 20, AR300: 20, AR288: 20, |
| | | | | AR175: 20, AR297: 20, AR289: 20, AR295: 19, AR255: 19, AR261: 19, AR299: 19, AR203: 19, AR207: 19, AR293: 18, AR196: 18, |
| | | | | AR268: 17, AR237: 17, AR296: 17, AR258: 17, AR282: 16, AR316: 16, AR285: 16, AR231: 15, AR269: 15, AR257: 15, AR178: 14, |
| | | | | AR234: 14, AR287: 14, AR181: 14, AR230: 14, AR033: 14, AR260: 14, AR267: 14, AR061: 14, AR233: 14, AR239: 14, AR183: 13, |
| | | | | AR266: 13, AR270: 13, AR229: 13, AR286: 13, AR277: 12, AR180: 12, AR060: 12, AR238: 12, AR226: 12, AR232: 12, AR176: 12, |
| | | | | AR227: 11, AR294: 11, AR228: 10, AR283: 9, AR235: 9, AR182: 8, AR104: 7, AR055: 5 H0415: 1 |
| | HOFMQ33 | 919896 | 255 | |
| | HOFMQ33 | 906694 | 256 | |
| | HOFMQ33 | 902639 | 257 | |
| | HOFMQ33 | 702186 | 258 | |
| 130 | HOFOC73 | 931871 | 140 | AR294: 16, AR169: 6, AR245: 6, AR192: 6, AR170: 6, AR195: 6, AR263: 5, AR039: 5, AR164: 4, AR165: 4, AR215: 4, AR053: 4, |
| | | | | AR266: 4, AR172: 4, AR161: 4, AR212: 4, AR162: 4, AR089: 4, AR222: 4, AR223: 4, AR213: 4, AR274: 4, AR261: 3, AR254: 3, |
| | | | | AR272: 3, AR221: 3, AR264: 3, AR171: 3, AR205: 3, AR225: 3, AR168: 3, AR193: 3, AR060: 3, AR217: 3, AR277: 3, AR096: 3, |
| | | | | AR224: 3, AR282: 3, AR175: 3, AR308: 3, AR312: 3, AR214: 3, AR196: 3, AR288: 3, AR235: 2, AR180: 2, AR197: 2, AR311: 2, |
| | | | | AR283: 2, AR299: 2, AR240: 2, AR316: 2, AR295: 2, AR216: 2, AR297: 2, AR270: 2, AR236: 2, AR291: 2, AR104: 2, AR055: 2, |
| | | | | AR188: 2, AR238: 2, AR201: 2, AR300: 2, AR246: 2, AR191: 2, AR293: 2, AR243: 2, AR309: 2, AR176: 2, AR247: 2, AR289: 2, |
| | | | | AR257: 2, AR174: 2, AR285: 2, AR173: 2, AR185: 2, AR200: 2, AR178: 2, AR190: 2, AR267: 2, AR210: 2, AR177: 2, AR268: 2, |
| | | | | AR290: 2, AR233: 2, AR275: 2, AR203: 2, AR189: 2, AR181: 1, AR286: 1, AR287: 1, AR033: 1, AR313: 1, AR296: 1, AR199: 1, |
| | | | | AR228: 1, AR227: 1, AR231: 1, AR262: 1, AR237: 1, AR252: 1, AR218: 1, AR242: 1, AR207: 1, AR234: 1, AR226: 1, AR258: 1 |
| | | | | L0740: 8, L0748: 7, L0749: 7, L0752: 4, L0588: 4, L0750: 3, L0757: 3, L0759: 3, S0436: 3, S0358: 2, H0415: 2, H0090: 2, L0774: 2, |
| | | | | L0805: 2, L0776: 2, L0783: 2, L0809: 2, L0751: 2, L0747: 2, S0040: 1, S0420: 1, S0442: 1, S0376: 1, S0360: 1, S0408: 1, H0580: 1, |
| | | | | H0550: 1, L0586: 1, H0036: 1, S0346: 1, H0581: 1, T0110: 1, H0597: 1, H0530: 1, H0123: 1, H0083: 1, H0354: 1, H0510: 1, |
| | | | | T0069: 1, H0560: 1, S0210: 1, L0763: 1, L0637: 1, L0646: 1, L0800: 1, L0771: 1, L0773: 1, L0775: 1, L0659: 1, L0789: 1, L0666: 1, |
| | | | | H0691: 1, H0576: 1, H0478: 1, H0626: 1, L0731: 1, H0444: 1, L0592: 1 and S0242: 1. |
| | HOFOC73 | 907073 | 259 | |
| | HOFOC73 | 907072 | 260 | |
| | HOFOC73 | 878863 | 261 | |
| 131 | HOQBJ82 | 1352356 | 141 | AR207: 16, AR197: 15, AR309: 14, AR195: 13, AR311: 13, AR263: 13, AR224: 13, AR264: 13, AR245: 13, AR223: 12, AR235: 12, |
| | | | | AR253: 12, AR252: 12, AR246: 11, AR201: 11, AR222: 10, AR170: 10, AR171: 10, AR221: 10, AR053: 10, AR312: 10, AR172: 9, |
| | | | | AR308: 9, AR198: 9, AR169: 9, AR225: 9, AR168: 9, AR242: 9, AR214: 9, AR215: 9, AR177: 9, AR192: 9, AR212: 9, AR272: 9, |
| | | | | AR165: 9, AR295: 8, AR196: 8, AR089: 8, AR166: 8, AR271: 8, AR261: 8, AR216: 8, AR164: 8, AR210: 8, AR200: 7, AR199: 7, |
| | | | | AR213: 7, AR218: 7, AR277: 7, AR254: 7, AR288: 7, AR176: 7, AR219: 7, AR316: 7, AR193: 7, AR274: 7, AR240: 7, AR285: 7, |
| | | | | AR181: 7, AR236: 7, AR217: 7, AR282: 7, AR204: 7, AR178: 7, AR211: 6, AR291: 6, AR275: 6, AR286: 6, AR162: 6, AR161: 6, |
| | | | | AR287: 6, AR060: 6, AR247: 6, AR203: 6, AR096: 6, AR250: 6, AR163: 6, AR243: 6, AR188: 6, AR183: 6, AR033: 6, AR205: 6, |
| | | | | AR266: 6, AR191: 6, AR268: 6, AR174: 6, AR180: 6, AR189: 6, AR293: 5, AR229: 5, AR104: 5, AR175: 5, AR289: 5, AR055: 5, |
| | | | | AR270: 5, AR299: 5, AR297: 5, AR296: 5, AR039: 5, AR313: 5, AR300: 5, AR231: 5, AR262: 5, AR234: 5, AR290: 5, AR267: 5, |
| | | | | AR257: 5, AR239: 5, AR233: 4, AR226: 4, AR238: 4, AR237: 4, AR269: 4, AR258: 4, AR173: 4, AR185: 4, AR228: 4, AR294: 4, |
| | | | | AR283: 4, AR182: 4, AR230: 4, AR061: 4, AR255: 4, AR190: 4, AR232: 4, AR179: 4, AR256: 4, AR260: 4, AR227: 3 L0766: 12, |
| | | | | L0758: 7, H0616: 4, L0439: 4, L0754: 4, L0747: 4, L0779: 4, L0777: 4, L0601: 4, H0657: 3, H0656: 3, H0081: 3, H0031: 3, H0038: 3, |
| | | | | S0222: 2, H0455: 2, H0618: 2, H0617: 2, T0042: 2, H0494: 2, S0210: 2, H0529: 2, L0769: 2, L0662: 2, L0794: 2, L0665: 2, H0445: 2, |
| | | | | H0543: 2, H0170: 1, H0394: 1, H0556: 1, T0002: 1, S0029: 1, H0662: 1, S0358: 1, S0045: 1, S0046: 1, S0140: 1, L0717: 1, H0370: 1, |
| | | | | H0392: 1, H0497: 1, H0574: 1, H0253: 1, H0318: 1, H0597: 1, H0544: 1, H0545: 1, H0178: 1, L0157: 1, L0471: 1, S0050: 1, |
| | | | | H0014: 1, H0051: 1, T0010: 1, H0408: 1, H0266: 1, H0188: 1, H0290: 1, S0022: 1, H0135: 1, H0090: 1, H0040: 1, H0634: 1, |
| | | | | H0264: 1, S0448: 1, H0641: 1, S0142: 1, S0344: 1, L0770: 1, L0637: 1, L0645: 1, L0771: 1, L0521: 1, L0768: 1, L0803: 1, L0806: 1, |
| | | | | L0805: 1, L0652: 1, L0653: 1, L0776: 1, L0655: 1, L0629: 1, L0659: 1, L0789: 1, L0791: 1, L0663: 1, L0664: 1, H0519: 1, H0682: 1, |
| | | | | H0539: 1, H0521: 1, H0522: 1, H0134: 1, H0214: 1, L0749: 1, L0750: 1, H0667: 1, H0542: 1, H0423: 1 and H0422: 1. |
| | HOQBJ82 | 858338 | 262 | |
| | HOQBJ82 | 857453 | 263 | |
| 132 | HOSBY40 | 589431 | 142 | AR197: 6, AR309: 6, AR250: 5, AR176: 5, AR245: 4, AR169: 4, AR161: 4, AR162: 4, AR277: 4, AR163: 4, AR201: 4, AR282: 4, |
| | | | | AR253: 4, AR198: 4, AR177: 4, AR229: 3, AR272: 3, AR181: 3, AR089: 3, AR299: 3, AR193: 3, AR264: 3, AR269: 3, AR239: 3, |
| | | | | AR190: 3, AR189: 3, AR246: 3, AR233: 3, AR237: 3, AR195: 3, AR257: 3, AR238: 3, AR300: 3, AR313: 3, AR165: 3, AR270: 3, |
| | | | | AR172: 3, AR166: 3, AR271: 3, AR275: 3, AR255: 3, AR240: 3, AR207: 2, AR274: 2, AR216: 2, AR228: 2, AR312: 2, AR215: 2, |
| | | | | AR183: 2, AR196: 2, AR226: 2, AR311: 2, AR096: 2, AR203: 2, AR262: 2, AR191: 2, AR247: 2, AR060: 2, AR268: 2, AR316: 2, |
| | | | | AR199: 2, AR188: 2, AR243: 2, AR205: 2, AR261: 2, AR231: 2, AR178: 2, AR180: 2, AR227: 2, AR223: 2, AR263: 2, AR232: 2, |
| | | | | AR266: 2, AR222: 2, AR061: 2, AR164: 2, AR258: 2, AR217: 1, AR200: 1, AR213: 1, AR224: 1, AR174: 1, AR283: 1, AR182: 1, |
| | | | | AR267: 1, AR171: 1, AR185: 1, AR234: 1, AR192: 1, AR297: 1, AR170: 1, S0418: 1, H0393: 1, S0003: 1, L0766: 1, L0804: 1 and |
| | | | | S0052: 1. |
| 133 | HOSDJ25 | 854234 | 143 | AR207: 16, AR263: 14, AR235: 13, AR224: 13, AR225: 13, AR309: 12, AR196: 12, AR311: 12, AR214: 12, AR223: 12, AR172: 12, |
| | | | | AR246: 11, AR168: 11, AR217: 11, AR264: 11, AR171: 11, AR215: 11, AR170: 11, AR291: 10, AR221: 10, AR222: 10, AR295: 10, |
| | | | | AR288: 10, AR195: 10, AR039: 10, AR277: 10, AR192: 10, AR197: 10, AR161: 10, AR169: 10, AR162: 10, AR261: 9, AR216: 9, |
| | | | | AR163: 9, AR165: 9, AR205: 9, AR210: 9, AR236: 9, AR177: 9, AR198: 9, AR164: 9, AR089: 9, AR191: 9, AR245: 9, AR201: 9, |
| | | | | AR242: 9, AR212: 9, AR166: 8, AR188: 8, AR285: 8, AR240: 8, AR174: 8, AR252: 8, AR290: 8, AR271: 8, AR250: 8, AR260: 8, |
| | | | | AR176: 8, AR219: 8, AR282: 8, AR200: 8, AR312: 8, AR316: 8, AR253: 8, AR181: 8, AR297: 7, AR060: 7, AR308: 7, AR096: 7, |
| | | | | AR199: 7, AR289: 7, AR286: 7, AR287: 7, AR293: 7, AR213: 7, AR262: 7, AR313: 7, AR180: 7, AR300: 7, AR269: 7, AR257: 7, |
| | | | | AR193: 7, AR231: 6, AR275: 6, AR296: 6, AR258: 6, AR255: 6, AR175: 6, AR218: 6, AR190: 6, AR053: 6, AR266: 6, AR178: 6, |
| | | | | AR270: 6, AR268: 6, AR233: 6, AR243: 6, AR182: 6, AR189: 6, AR294: 6, AR104: 6, AR185: 6, AR239: 6, AR173: 5, AR179: 5, |
| | | | | AR204: 5, AR272: 5, AR256: 5, AR299: 5, AR274: 5, AR247: 5, AR033: 5, AR183: 5, AR211: 5, AR229: 5, AR267: 5, AR234: 5, |
| | | | | AR237: 5, AR055: 5, AR238: 4, AR228: 4, AR230: 4, AR203: 4, AR061: 4, AR283: 4, AR232: 4, AR226: 4, AR227: 3, AR254: 3 |
| | | | | L0754: 4, L0749: 4, L0659: 3, L0755: 3, S0356: 2, L0803: 2, L0750: 2, L0779: 2, L0599: 2, S0029: 1, H0661: 1, S0354: 1, H0642: 1, |
| | | | | T0040: 1, L0021: 1, H0599: 1, H0510: 1, S0003: 1, H0674: 1, H0316: 1, H0623: 1, S0422: 1, L0794: 1, L0522: 1, L0774: 1, L0526: 1, |
| | | | | L0809: 1, H0520: 1, H0659: 1, H0670: 1, L0752: 1, L0608: 1 and S0242: 1. |
| | HOSDJ25 | 566845 | 264 | |
| 134 | HPEAD79 | 520202 | 144 | AR277: 24, AR176: 5, AR039: 5, AR162: 5, AR205: 5, AR161: 5, AR235: 5, AR163: 5, AR282: 5, AR309: 5, AR168: 4, AR223: 4, |
| | | | | AR228: 4, AR181: 4, AR266: 4, AR182: 4, AR269: 4, AR229: 4, AR257: 3, AR233: 3, AR272: 3, AR178: 3, AR180: 3, AR165: 3, |
| | | | | AR264: 3, AR261: 3, AR268: 3, AR195: 3, AR164: 3, AR275: 3, AR166: 3, AR267: 3, AR183: 3, AR196: 3, AR238: 3, AR237: 3, |
| | | | | AR236: 3, AR316: 3, AR171: 3, AR170: 3, AR179: 3, AR245: 3, AR060: 3, AR262: 3, AR193: 3, AR177: 3, AR255: 3, AR242: 3, |
| | | | | AR289: 3, AR201: 3, AR230: 3, AR311: 3, AR254: 3, AR215: 2, AR290: 2, AR294: 2, AR204: 2, AR216: 2, AR231: 2, AR287: 2, |
| | | | | AR299: 2, AR288: 2, AR227: 2, AR300: 2, AR033: 2, AR089: 2, AR191: 2, AR239: 2, AR173: 2, AR271: 2, AR225: 2, AR270: 2, |
| | | | | AR295: 2, AR293: 2, AR296: 2, AR234: 2, AR185: 2, AR285: 2, AR214: 2, AR226: 2, AR274: 2, AR190: 2, AR203: 2, AR096: 2, |
| | | | | AR199: 2, AR189: 2, AR247: 2, AR297: 2, AR200: 2, AR217: 2, AR246: 2, AR055: 2, AR175: 2, AR211: 2, AR232: 2, AR061: 2, |
| | | | | AR283: 2, AR286: 2, AR053: 1, AR222: 1, AR263: 1, AR256: 1, AR260: 1, AR258: 1, AR210: 1, AR291: 1, AR188: 1, AR174: 1, |
| | | | | AR312: 1, AR252: 1, AR224: 1, AR219: 1, H0165: 1 |
| 135 | HPIBO15 | 1310868 | 145 | AR240: 10, AR211: 10, AR178: 9, AR270: 8, AR221: 8, AR295: 7, AR235: 7, AR161: 7, AR162: 7, AR189: 7, AR163: 7, AR288: 7, |
| | | | | AR255: 6, AR191: 6, AR175: 6, AR293: 6, AR096: 6, AR183: 6, AR182: 6, AR188: 6, AR269: 5, AR236: 5, AR190: 5, AR173: 5, |
| | | | | AR180: 5, AR165: 5, AR174: 5, AR290: 5, AR164: 5, AR274: 5, AR166: 5, AR060: 5, AR261: 5, AR179: 5, AR203: 5, AR195: 5, |
| | | | | AR222: 5, AR055: 4, AR193: 4, AR181: 4, AR297: 4, AR291: 4, AR171: 4, AR197: 4, AR168: 4, AR289: 4, AR266: 4, AR268: 4, |
| | | | | AR296: 4, AR262: 4, AR287: 4, AR104: 4, AR196: 4, AR267: 4, AR247: 4, AR177: 4, AR299: 4, AR176: 4, AR033: 4, AR246: 4, |
| | | | | AR172: 4, AR225: 3, AR263: 3, AR286: 3, AR275: 3, AR217: 3, AR170: 3, AR316: 3, AR294: 3, AR285: 3, AR308: 3, AR228: 3, |
| | | | | AR300: 3, AR282: 3, AR089: 3, AR257: 3, AR277: 3, AR214: 3, AR238: 3, AR224: 3, AR245: 3, AR233: 3, AR210: 3, AR272: 3, |
| | | | | AR201: 3, AR254: 3, AR309: 3, AR311: 3, AR243: 3, AR264: 3, AR212: 3, AR215: 3, AR185: 3, AR312: 3, AR260: 3, AR213: 3, |
| | | | | AR313: 3, AR053: 2, AR256: 2, AR200: 2, AR237: 2, AR231: 2, AR283: 2, AR229: 2, AR061: 2, AR239: 2, AR216: 2, AR227: 2, |
| | | | | AR232: 2, AR226: 2, AR258: 2, AR234: 2, AR230: 2, AR271: 2, AR199: 2, AR039: 1, AR223: 1 L0747: 8, L0749: 5, L0755: 5, |
| | | | | H0013: 3, L0769: 3, L0731: 3, S0212: 2, L0770: 2, L0803: 2, H0144: 2, L0756: 2, H0624: 1, H0171: 1, S0282: 1, H0776: 1, H0592: 1, |
| | | | | H0427: 1, H0575: 1, H0041: 1, H0124: 1, H0163: 1, H0038: 1, L0637: 1, L0774: 1, L0775: 1, L0791: 1, H0648: 1, H0756: 1, S0028: 1, |
| | | | | L0439: 1, L0777: 1 and S0436: 1. |
| | HPIBO15 | 590741 | 265 | |
| 136 | HPJBI33 | 685699 | 146 | AR161: 12, AR162: 12, AR163: 12, AR313: 8, AR165: 8, AR229: 8, AR164: 8, AR166: 7, AR275: 6, AR247: 6, AR180: 5, |
| | | | | AR264: 5, AR270: 5, AR173: 5, AR233: 5, AR237: 5, AR174: 5, AR274: 5, AR176: 5, AR181: 5, AR177: 5, AR246: 5, AR240: 5, |
| | | | | AR312: 4, AR263: 4, AR234: 4, AR309: 4, AR183: 4, AR096: 4, AR179: 4, AR185: 4, AR182: 4, AR238: 4, AR269: 4, AR178: 4, |
| | | | | AR282: 4, AR293: 4, AR272: 3, AR231: 3, AR296: 3, AR268: 3, AR196: 3, AR230: 3, AR104: 3, AR226: 3, AR170: 3, AR089: 3, |
| | | | | AR300: 3, AR228: 3, AR261: 3, AR175: 3, AR297: 3, AR236: 2, AR217: 2, AR291: 2, AR311: 2, AR169: 2, AR316: 2, AR255: 2, |
| | | | | AR033: 2, AR295: 2, AR294: 2, AR191: 2, AR267: 2, AR168: 2, AR171: 2, AR277: 2, AR286: 2, AR290: 2, AR262: 2, AR199: 2, |
| | | | | AR227: 2, A2R189: 2, AR239: 2, AR203: 2, AR257: 2, AR285: 2, AR223: 2, AR299: 2, AR266: 2, AR060: 2, AR287: 2, AR214: 2, |
| | | | | AR190: 1, AR200: 1, AR061: 1, AR308: 1, AR216: 1, AR213: 1, AR224: 1, AR195: 1, AR289: 1, AR055: 1 S0152: 1 |
| 137 | HPJBK12 | 1011467 | 147 | AR215: 5, AR197: 4, AR039: 4, AR309: 4, AR245: 4, AR161: 3, AR162: 3, AR163: 3, AR204: 3, AR165: 3, AR225: 3, AR169: 3, |
| | | | | AR264: 3, AR282: 3, AR272: 3, AR089: 3, AR180: 3, AR213: 3, AR172: 3, AR253: 2, AR166: 2, AR212: 2, AR193: 2, AR252: 2, |
| | | | | AR271: 2, AR312: 2, AR275: 2, AR164: 2, AR060: 2, AR240: 2, AR216: 2, AR266: 2, AR201: 2, AR205: 2, AR183: 2, AR176: 2, |
| | | | | AR195: 2, AR223: 2, AR283: 2, AR277: 1, AR311: 1, AR247: 1, AR313: 1, AR242: 1, AR199: 1, AR299: 1, AR316: 1, AR188: 1, |
| | | | | AR104: 1, AR168: 1, AR185: 1, AR291: 1, AR287: 1, AR231: 1, AR294: 1, AR230: 1, AR096: 1, S0152: 2 |
| | HPJBK12 | 525375 | 266 | |
| | HPJBK12 | 796925 | 267 | |
| | HPJBK12 | 699587 | 268 | |
| 138 | HPMDK28 | 846357 | 148 | AR055: 9, AR089: 9, AR218: 7, AR060: 7, AR104: 7, AR219: 7, AR299: 6, AR096: 6, AR185: 5, AR316: 4, AR313: 4, AR180: 4, |
| | | | | AR039: 4, AR282: 4, AR283: 3, AR198: 3, AR169: 3, AR165: 3, AR235: 3, AR242: 2, AR207: 2, AR300: 2, AR217: 2, AR223: 2, |
| | | | | AR277: 2, AR286: 2, AR270: 2, AR224: 2, AR263: 2, AR163: 2, AR161: 2, AR240: 2, AR166: 2, AR289: 2, AR272: 1, AR164: 1, |
| | | | | AR172: 1, AR261: 1, AR252: 1, AR269: 1, AR295: 1, AR170: 1, AR297: 1, AR177: 1 S0358: 5, L0809: 4, L0742: 4, L0743: 4, |
| | | | | L0590: 4, H0543: 4, S0360: 3, H0031: 3, S0422: 3, L0763: 3, L0764: 3, L0766: 3, L0754: 3, H0716: 2, H0333: 2, H0266: 2, H0617: 2, |
| | | | | L4497: 2, L0769: 2, L0776: 2, H0658: 2, H0696: 2, L0748: 2, L0749: 2, H0445: 2, S0434: 2, S0110: 1, H0663: 1, L0481: 1, H0730: 1, |
| | | | | H0747: 1, H0411: 1, H0431: 1, H0370: 1, H0574: 1, H0632: 1, L2490: 1, H0253: 1, H0052: 1, H0546: 1, H0545: 1, H0150: 1, |
| | | | | H0123: 1, H0012: 1, S0050: 1, S0051: 1, H0188: 1, S0003: 1, H0428: 1, T0006: 1, H0606: 1, H0673: 1, H0090: 1, H0040: 1, H0412: 1, |
| | | | | T0069: 1, S0112: 1, S0344: 1, H0538: 1, H0529: 1, L0770: 1, L0761: 1, L0662: 1, L0768: 1, L0794: 1, L0560: 1, L0775: 1, L0806: 1, |
| | | | | L0517: 1, L0540: 1, L0384: 1, L5622: 1, L0666: 1, L0665: 1, L2260: 1, L2654: 1, S0374: 1, H0684: 1, L3832: 1, S0004: 1, S0390: 1, |
| | | | | S3014: 1, L0439: 1, L0740: 1, L0747: 1, L0756: 1, L0779: 1, S0436: 1, L0480: 1, L0596: 1, S0026: 1, S0276: 1, S0196: 1, L2854: 1 |
| | | | | and L3612: 1. |
| | HPMDK28 | 639118 | 269 | |
| 139 | HPRAL78 | 1352342 | 149 | AR104: 11, AR089: 10, AR060: 9, AR283: 7, AR277: 7, AR039: 6, AR055: 6, AR316: 6, AR096: 6, AR219: 6, AR263: 5, AR299: 5, |
| | | | | AR218: 5, AR313: 5, AR185: 5, AR240: 5, AR282: 5, AR206: 3, AR204: 3, AR300: 2, AR312: 2, AR291: 2, AR251: 2, AR246: 2, |
| | | | | AR052: 2, AR184: 2, AR202: 2, AR290: 2, AR232: 2, AR295: 2, AR238: 2, AR237: 2, AR298: 2, AR270: 2, AR309: 2, AR292: 2, |
| | | | | AR268: 2, AR285: 1, AR177: 1, AR310: 1, AR182: 1, AR213: 1, AR226: 1, AR053: 1, AR186: 1, AR175: 1, AR289: 1, AR205: 1, |
| | | | | AR183: 1, AR233: 1, AR294: 1, AR284: 1, AR229: 1 H0694: 5, L0759: 5, L0766: 4, H0261: 3, S0222: 3, H0486: 3, H0052: 3, |
| | | | | L0731: 3, L3316: 2, H0252: 2, L0764: 2, L0662: 2, L0775: 2, L0657: 2, L0659: 2, L0530: 2, L0666: 2, L0748: 2, L0439: 2, L0750: 2, |
| | | | | L0588: 2, L0594: 2, H0224: 1, H0717: 1, H0656: 1, S0001: 1, S0360: 1, S0408: 1, H0729: 1, S0045: 1, H0619: 1, L3388: 1, H0592: 1, |
| | | | | H0587: 1, H0333: 1, S0474: 1, H0014: 1, L0163: 1, H0051: 1, H0355: 1, T0006: 1, H0644: 1, H0032: 1, H0212: 1, L0456: 1, |
| | | | | H0124: 1, H0708: 1, S0036: 1, H0038: 1, H0616: 1, H0087: 1, H0059: 1, H0280: 1, S0440: 1, S0150: 1, H0633: 1, L0369: 1, L0763: 1, |
| | | | | L0769: 1, L0638: 1, L0637: 1, L5566: 1, L0761: 1, L0772: 1, L0648: 1, L0803: 1, L0650: 1, L0805: 1, L0809: 1, L0647: 1, L0665: 1, |
| | | | | H0539: 1, H0521: 1, H0696: 1, H0555: 1, L0754: 1, L0749: 1, L0753: 1, L0755: 1, L0757: 1, L0605: 1, L0599: 1 and L3352: 1. |
| | HPRAL78 | 844216 | 270 | |
| | HPRAL78 | 484735 | 271 | |
| 140 | HRABA80 | 882176 | 150 | AR060: 929, AR104: 796, AR089: 725, AR055: 678, AR299: 627, AR283: 625, AR282: 494, AR185: 464, AR096: 462, |
| | | | | AR316: 387, AR039: 363, AR240: 317, AR277: 285, AR300: 278, AR218: 153, AR313: 152, AR219: 140, AR242: 4, AR221: 3, |
| | | | | AR217: 2, AR291: 2, AR172: 2, AR205: 2, AR163: 2, AR165: 2, AR178: 2, AR161: 2, AR168: 2, AR166: 2, AR164: 1, AR171: 1, |
| | | | | AR195: 1, AR268: 1, AR180: 1, AR266: 1, AR215: 1, AR234: 1, AR230: 1, AR257: 1, AR199: 1, AR270: 1, AR179: 1 H0555: 1 |
| | HRABA80 | 588460 | 272 | |
| 141 | HRACD15 | 871221 | 151 | AR193: 12, AR165: 11, AR164: 11, AR166: 10, AR299: 10, AR313: 9, AR162: 9, AR161: 9, AR246: 9, AR163: 9, AR205: 9, |
| | | | | AR312: 9, AR311: 9, AR089: 8, AR243: 8, AR245: 8, AR096: 8, AR195: 8, AR242: 7, AR176: 7, AR270: 7, AR291: 7, AR212: 7, |
| | | | | AR297: 7, AR264: 7, AR288: 7, AR199: 7, AR197: 7, AR282: 7, AR300: 6, AR240: 6, AR272: 6, AR196: 6, AR285: 6, AR275: 6, |
| | | | | AR201: 6, AR200: 6, AR263: 6, AR213: 6, AR229: 6, AR221: 6, AR225: 6, AR183: 6, AR266: 6, AR268: 5, AR293: 5, AR283: 5, |
| | | | | AR255: 5, AR104: 5, AR247: 5, AR274: 5, AR308: 5, AR180: 5, AR262: 5, AR295: 5, AR236: 5, AR316: 5, AR254: 5, AR053: 5, |
| | | | | AR191: 5, AR215: 5, AR287: 5, AR277: 5, AR203: 5, AR238: 5, AR188: 5, AR223: 5, AR039: 5, AR235: 5, AR269: 4, AR261: 4, |
| | | | | AR189: 4, AR309: 4, AR289: 4, AR060: 4, AR258: 4, AR182: 4, AR175: 4, AR294: 4, AR210: 4, AR185: 4, AR286: 4, AR174: 4, |
| | | | | AR178: 4, AR198: 4, AR192: 4, AR257: 4, AR177: 4, AR190: 4, AR290: 4, AR173: 4, AR179: 4, AR033: 4, AR296: 3, AR214: 3, |
| | | | | AR217: 3, AR181: 3, AR267: 3, AR170: 3, AR256: 3, AR231: 3, AR224: 3, AR253: 3, AR234: 3, AR230: 3, AR239: 3, AR260: 3, |
| | | | | AR237: 3, AR252: 3, AR250: 3, AR233: 3, AR216: 3, AR204: 2, AR226: 2, AR227: 2, AR232: 2, AR061: 2, AR228: 2, AR211: 2, |
| | | | | AR171: 2, AR222: 2, AR172: 2, AR168: 2, AR055: 2, AR207: 1, AR218: 1 H0556: 15, H0265: 8, L0751: 8, H0617: 7, L0662: 7, |
| | | | | L0766: 5, L0809: 5, H0040: 4, H0494: 4, S0142: 4, L0769: 4, H0555: 4, L0750: 4, H0543: 4, H0341: 3, L0534: 3, H0486: 3, L0649: 3, |
| | | | | L0666: 3, H0658: 3, L0749: 3, L0758: 3, H0624: 2, S0040: 2, L0415: 2, H0261: 2, H0549: 2, H0550: 2, H0618: 2, H0052: 2, S0150: 2, |
| | | | | L0805: 2, L0807: 2, L0657: 2, L0790: 2, H0539: 2, S0380: 2, L0748: 2, L0747: 2, L0731: 2, L0759: 2, S0434: 2, H0685: 1, S0114: 1, |
| | | | | H0583: 1, H0483: 1, H0255: 1, H0305: 1, H0589: 1, H0125: 1, L0539: 1, S0444: 1, S0360: 1, H0729: 1, H0619: 1, S0278: 1, H0392: 1, |
| | | | | H0592: 1, L3817: 1, H0485: 1, H0635: 1, S0280: 1, H0599: 1, H0042: 1, H0194: 1, H0546: 1, H0046: 1, H0571: 1, H0050: 1, |
| | | | | H0620: 1, H0024: 1, H0594: 1, H0266: 1, H0416: 1, H0188: 1, H0290: 1, H0213: 1, H0031: 1, H0644: 1, H0628: 1, H0606: 1, |
| | | | | H0166: 1, H0169: 1, H0124: 1, S0366: 1, H0598: 1, H0135: 1, H0038: 1, H0616: 1, H0087: 1, H0100: 1, H0429: 1, S0016: 1, |
| | | | | H0561: 1, H0132: 1, H0646: 1, S0422: 1, L0598: 1, H0529: 1, L0763: 1, L0638: 1, L4747: 1, L0761: 1, L0800: 1, L0648: 1, L0774: 1, |
| | | | | L0651: 1, L0378: 1, L0776: 1, L0629: 1, L0382: 1, L0788: 1, L0791: 1, L0663: 1, H0144: 1, H0593: 1, H0689: 1, H0659: 1, S0406: 1, |
| | | | | S0037: 1, L0745: 1, L0779: 1, L0752: 1, L0755: 1, S0394: 1, L0593: 1, S0026: 1, H0665: 1, H0542: 1, H0423: 1 and H0506: 1. |
| | HRACD15 | 706332 | 273 | |
| 142 | HRACJ35 | 877666 | 152 | AR222: 51, AR224: 51, AR221: 28, AR223: 24, AR225: 20, AR172: 14, AR171: 9, AR170: 9, AR182: 9, AR215: 9, AR214: 9, |
| | | | | AR183: 8, AR216: 8, AR169: 8, AR168: 7, AR268: 7, AR217: 7, AR180: 7, AR176: 5, AR269: 5, AR173: 5, AR266: 5, AR175: 4, |
| | | | | AR270: 4, AR165: 4, AR164: 4, AR181: 4, AR166: 4, AR290: 4, AR163: 4, AR238: 4, AR096: 4, AR161: 4, AR162: 4, AR195: 3, |
| | | | | AR267: 3, AR274: 3, AR291: 3, AR243: 3, AR250: 3, AR289: 3, AR179: 3, AR316: 3, AR230: 3, AR247: 3, AR282: 3, AR060: 3, |
| | | | | AR257: 3, AR240: 2, AR104: 2, AR246: 2, AR196: 2, AR255: 2, AR177: 2, AR300: 2, AR228: 2, AR288: 2, AR231: 2, AR237: 2, |
| | | | | AR277: 2, AR174: 2, AR192: 2, AR178: 2, AR297: 2, AR191: 2, AR229: 2, AR226: 2, AR205: 2, AR061: 2, AR185: 2, AR190: 2, |
| | | | | AR189: 2, AR263: 2, AR294: 2, AR203: 2, AR233: 2, AR210: 2, AR275: 2, AR287: 1, AR089: 1, AR283: 1, AR234: 1, AR033: 1, |
| | | | | AR311: 1, AR213: 1, AR055: 1, AR293: 1, AR227: 1, AR201: 1, AR312: 1, AR200: 1, AR039: 1, AR188: 1, AR239: 1, AR296: 1, |
| | | | | AR193: 1 L0731: 11, L0803: 7, L0748: 7, L0517: 6, L0809: 6, L0749: 6, L0439: 5, S0410: 4, S0002: 4, L0770: 4, L0794: 4, L0805: 4, |
| | | | | L3212: 4, S0436: 4, L3388: 3, H0553: 3, L0506: 3, L0747: 3, L0752: 3, H0713: 2, H0661: 2, H0244: 2, H0156: 2, H0644: 2, L0662: 2, |
| | | | | L0775: 2, L0666: 2, L0438: 2, H0521: 2, L0757: 2, L0758: 2, L0759: 2, H0171: 1, S0040: 1, H0650: 1, S0212: 1, S0358: 1, S0444: 1, |
| | | | | S0360: 1, H0580: 1, H0722: 1, H0208: 1, H0619: 1, H0441: 1, H0537: 1, H0497: 1, H0333: 1, H0632: 1, T0060: 1, H0013: 1, |
| | | | | H0427: 1, S0346: 1, H0052: 1, H0231: 1, H0166: 1, H0673: 1, S0364: 1, L0455: 1, H0163: 1, H0040: 1, S0015: 1, H0745: 1, H0509: 1, |
| | | | | H0652: 1, S0210: 1, S0426: 1, L0796: 1, L0766: 1, L0804: 1, L0774: 1, L0776: 1, L0659: 1, L0526: 1, L0783: 1, L0529: 1, L0647: 1, |
| | | | | L0665: 1, H0144: 1, H0696: 1, H0555: 1, L0611: 1, S0028: 1, S0206: 1, L0751: 1, L0745: 1, S0260: 1, L0599: 1, H0668: 1, L0698: 1 |
| | | | | and S0460: 1. |
| | HRACJ35 | 730504 | 274 | |
| | HRACJ35 | 470546 | 275 | |
| 143 | HRGBL78 | 910133 | 153 | AR052: 15, AR213: 14, AR053: 10, AR244: 8, AR096: 7, AR184: 6, AR215: 6, AR310: 5, AR251: 5, AR241: 5, AR221: 4, |
| | | | | AR273: 4, AR170: 4, AR270: 3, AR206: 3, AR249: 3, AR186: 3, AR284: 3, AR312: 3, AR290: 3, AR292: 3, AR168: 3, AR039: 3, |
| | | | | AR266: 3, AR055: 3, AR298: 3, AR282: 3, AR172: 3, AR198: 3, AR281: 3, AR202: 3, AR289: 2, AR205: 2, AR269: 2, AR313: 2, |
| | | | | AR293: 2, AR295: 2, AR061: 2, AR253: 2, AR183: 2, AR316: 2, AR182: 2, AR265: 2, AR267: 2, AR277: 2, AR285: 2, AR195: 2, |
| | | | | AR268: 2, AR238: 2, AR299: 2, AR259: 2, AR296: 2, AR286: 2, AR300: 2, AR309: 2, AR291: 2, AR171: 2, AR212: 2, AR060: 2, |
| | | | | AR274: 2, AR169: 2, AR246: 2, AR033: 2, AR229: 2, AR175: 2, AR223: 2, AR181: 2, AR294: 2, AR226: 1, AR247: 1, AR232: 1, |
| | | | | AR275: 1, AR217: 1, AR089: 1, AR180: 1, AR240: 1, AR192: 1, AR210: 1, AR263: 1, AR185: 1, AR164: 1, AR166: 1, AR258: 1, |
| | | | | AR201: 1, AR257: 1, AR104: 1, AR163: 1, AR177: 1, AR243: 1 L0740: 25, L0766: 5, L0655: 4, H0650: 2, H0657: 2, H0656: 2, |
| | | | | H0402: 2, H0581: 2, L0761: 2, L0794: 2, H0306: 1, S0408: 1, H0318: 1, H0046: 1, H0266: 1, S0038: 1, H0429: 1, H0560: 1, S0344: 1, |
| | | | | L0789: 1, S0053: 1, H0689: 1, H0134: 1, L0779: 1, L0777: 1 and H0445: 1. |
| | HRGBL78 | 904040 | 276 | |
| | HRGBL78 | 904621 | 277 | |
| | HRGBL78 | 863802 | 278 | |
| 144 | HROAJ39 | 1181699 | 154 | AR055: 8, AR060: 6, AR218: 6, AR300: 5, AR316: 4, AR089: 4, AR240: 4, AR282: 3, AR185: 3, AR104: 3, AR299: 3, AR313: 3, |
| | | | | AR096: 3, AR283: 3, AR039: 2, AR219: 2, AR277: 2 H0316: 1, L3905: 1, L0565: 1, L0438: 1, H0521: 1, L0439: 1 and L0594: 1. |
| | HROAJ39 | 1114849 | 279 | |
| | HROAJ39 | 1027712 | 280 | |
| 145 | HROBD68 | 827306 | 155 | AR196: 23, AR161: 12, AR162: 12, AR163: 11, AR313: 11, AR242: 9, AR165: 8, AR164: 8, AR166: 8, AR191: 8, AR089: 8, |
| | | | | AR275: 8, AR096: 7, AR181: 7, AR175: 7, AR053: 7, AR299: 6, AR173: 6, AR264: 6, AR060: 6, AR258: 5, AR236: 5, AR257: 5, |
| | | | | AR198: 5, AR312: 5, AR177: 5, AR263: 5, AR185: 5, AR180: 5, AR274: 5, AR293: 5, AR174: 5, AR179: 5, AR200: 5, AR270: 5, |
| | | | | AR225: 5, AR250: 5, AR269: 5, AR178: 5, AR300: 5, AR282: 5, AR195: 5, AR199: 5, AR247: 5, AR309: 5, AR188: 4, AR316: 4, |
| | | | | AR203: 4, AR183: 4, AR189: 4, AR238: 4, AR287: 4, AR285: 4, AR294: 4, AR308: 4, AR104: 4, AR240: 4, AR226: 4, AR261: 4, |
| | | | | AR182: 4, AR311: 4, AR229: 4, AR277: 4, AR271: 4, AR295: 4, AR207: 4, AR255: 4, AR262: 4, AR176: 4, AR235: 4, AR268: 4, |
| | | | | AR291: 4, AR297: 4, AR213: 3, AR233: 3, AR231: 3, AR296: 3, AR286: 3, AR288: 3, AR212: 3, AR290: 3, AR234: 3, AR237: 3, |
| | | | | AR169: 3, AR266: 3, AR219: 3, AR272: 3, AR190: 3, AR254: 3, AR260: 3, AR267: 3, AR193: 3, AR230: 3, AR239: 3, AR216: 3, |
| | | | | AR228: 2, AR211: 2, AR218: 2, AR201: 2, AR171: 2, AR246: 2, AR227: 2, AR205: 2, AR232: 2, AR033: 2, AR055: 2, AR289: 2, |
| | | | | AR283: 2, AR172: 1, AR204: 1, AR214: 1, AR215: 1, AR256: 1, AR061: 1, AR168: 1, AR197: 1, AR170: 1, AR192: 1 L0509: 9, |
| | | | | L0766: 4, L0515: 2, L0783: 2, S0342: 1, S0114: 1, S0218: 1, H0589: 1, H0645: 1, H0592: 1, H0250: 1, H0581: 1, H0057: 1, H0252: 1, |
| | | | | H0328: 1, H0674: 1, H0598: 1, H0090: 1, H0634: 1, H0488: 1, H0625: 1, S0426: 1, L0506: 1, L0667: 1, L0499: 1, L0803: 1, L0493: 1, |
| | | | | L0514: 1, L0511: 1, L0809: 1, S0052: 1, S0428: 1, H0683: 1, S0152: 1, S0136: 1, L0748: 1, L0751: 1, L0759: 1, L0599: 1 and |
| | | | | H0543: 1. |
| 146 | HSAWD74 | 460527 | 156 | AR039: 35, AR313: 32, AR096: 24, AR089: 22, AR299: 17, AR300: 16, AR104: 13, AR185: 13, AR277: 13, AR316: 13, AR060: 13, |
| | | | | AR173: 12, AR165: 12, AR166: 12, AR240: 11, AR164: 11, AR218: 11, AR162: 11, AR161: 11, AR163: 10, AR229: 10, AR178: 9, |
| | | | | AR242: 9, AR175: 9, AR262: 9, AR247: 9, AR183: 9, AR258: 8, AR275: 8, AR055: 8, AR257: 8, AR180: 7, AR293: 7, AR282: 7, |
| | | | | AR181: 7, AR196: 7, AR204: 7, AR312: 7, AR219: 7, AR193: 7, AR191: 6, AR238: 6, AR176: 6, AR198: 6, AR269: 6, AR235: 6, |
| | | | | AR199: 6, AR179: 6, AR270: 6, AR233: 6, AR182: 6, AR297: 6, AR234: 6, AR254: 6, AR177: 6, AR296: 6, AR174: 6, AR236: 5, |
| | | | | AR203: 5, AR226: 5, AR283: 5, AR266: 5, AR285: 5, AR268: 5, AR245: 5, AR255: 5, AR188: 5, AR309: 5, AR267: 5, AR053: 5, |
| | | | | AR287: 5, AR294: 5, AR213: 5, AR274: 5, AR286: 5, AR200: 5, AR231: 4, AR308: 4, AR033: 4, AR288: 4, AR189: 4, AR237: 4, |
| | | | | AR260: 4, AR261: 4, AR291: 4, AR201: 4, AR172: 4, AR243: 4, AR295: 4, AR228: 4, AR222: 4, AR290: 4, AR271: 4, AR212: 4, |
| | | | | AR264: 4, AR272: 3, AR252: 3, AR169: 3, AR230: 3, AR239: 3, AR205: 3, AR253: 3, AR227: 3, AR197: 3, AR289: 3, AR225: 3, |
| | | | | AR207: 3, AR190: 3, AR217: 2, AR214: 2, AR061: 2, AR216: 2, AR256: 2, AR232: 2, AR263: 2, AR195: 2, AR223: 2, AR221: 2, |
| | | | | AR246: 2, AR311: 1, AR192: 1, AR168: 1, AR210: 1, AR211: 1, H0068: 3, S0114: 2, L0534: 2, L0740: 2, H0717: 1, S0134: 1, |
| | | | | S0442: 1, S0354: 1, S0476: 1, H0333: 1, H0009: 1, H0560: 1, L5565: 1 and H0576: 1. |
| | HSAWD74 | 371416 | 281 | |
| 147 | HSDEK49 | 1352253 | 157 | AR290: 45, AR268: 37, AR240: 23, AR267: 22, AR269: 16, AR270: 14, AR234: 10, AR055: 10, AR238: 10, AR184: 9, AR292: 8, |
| | | | | AR291: 8, AR179: 8, AR183: 8, AR284: 7, AR177: 7, AR182: 6, AR060: 6, AR299: 5, AR295: 5, AR285: 5, AR244: 5, AR293: 5, |
| | | | | AR175: 5, AR096: 4, AR185: 3, AR229: 3, AR249: 3, AR296: 3, AR316: 3, AR231: 3, AR298: 3, AR289: 3, AR104: 3, AR237: 3, |
| | | | | AR286: 2, AR089: 2, AR226: 2, AR204: 2, AR266: 2, AR282: 2, AR294: 2, AR227: 2, AR313: 2, AR247: 2, AR300: 2, AR233: 2, |
| | | | | AR248: 2, AR259: 2, AR275: 2, AR256: 2, AR039: 1, AR033: 1, AR277: 1, AR263: 1, AR061: 1, AR258: 1, AR232: 1, AR271: 1, |
| | | | | AR283: 1, AR310: 1 H0031: 7, L0439: 7, L0754: 7, L3388: 6, L0731: 6, S0002: 5, H0580: 4, H0575: 3, H0309: 3, L0438: 3, |
| | | | | H0555: 3, L0758: 3, S0360: 2, L3649: 2, H0553: 2, S0344: 2, S0426: 2, L0775: 2, S0330: 2, L0747: 2, L0779: 2, S0260: 2, L0599: 2, |
| | | | | L0603: 2, H0739: 1, H0170: 1, S0116: 1, S0354: 1, S0444: 1, L3645: 1, H0270: 1, S0280: 1, H0590: 1, H0581: 1, H0251: 1, H0014: 1, |
| | | | | H0355: 1, H0030: 1, H0644: 1, H0674: 1, H0090: 1, H0063: 1, S0142: 1, L0770: 1, L0769: 1, L0651: 1, L0776: 1, L0659: 1, L0519: 1, |
| | | | | L0664: 1, H0682: 1, L0749: 1, L0752: 1, S0031: 1 and H0506: 1. |
| | HSDEK49 | 625998 | 282 | |
| 148 | HSDFJ26 | 834619 | 158 | AR263: 62, AR264: 49, AR269: 11, AR161: 9, AR162: 9, AR163: 9, AR176: 8, AR181: 6, AR309: 6, AR182: 6, AR191: 6, |
| | | | | AR235: 6, AR266: 6, AR223: 5, AR215: 5, AR267: 5, AR180: 5, AR268: 5, AR178: 5, AR311: 5, AR228: 5, AR282: 5, AR183: 5, |
| | | | | AR165: 4, AR174: 4, AR096: 4, AR177: 4, AR164: 4, AR236: 4, AR270: 4, AR214: 4, AR233: 4, AR179: 4, AR190: 4, AR166: 4, |
| | | | | AR237: 4, AR308: 4, AR255: 3, AR055: 3, AR189: 3, AR168: 3, AR216: 3, AR175: 3, AR294: 3, AR217: 3, AR239: 3, AR231: 3, |
| | | | | AR172: 3, AR207: 3, AR275: 3, AR238: 3, AR240: 3, AR229: 3, AR316: 3, AR222: 3, AR170: 3, AR272: 3, AR225: 3, AR247: 3, |
| | | | | AR061: 3, AR226: 3, AR060: 3, AR274: 3, AR232: 3, AR199: 3, AR291: 3, AR260: 3, AR234: 2, AR230: 2, AR288: 2, AR312: 2, |
| | | | | AR262: 2, AR290: 2, AR203: 2, AR053: 2, AR227: 2, AR287: 2, AR104: 2, AR289: 2, AR285: 2, AR185: 2, AR313: 2, AR295: 2, |
| | | | | AR257: 2, AR200: 2, AR188: 2, AR293: 2, AR252: 2, AR193: 2, AR256: 2, AR261: 2, AR196: 2, AR089: 2, AR300: 2, AR283: 1, |
| | | | | AR219: 1, AR201: 1, AR271: 1, AR171: 1, AR224: 1, AR286: 1, AR033: 1, AR211: 1, AR297: 1, AR258: 1, AR277: 1 S0026: 6, |
| | | | | S0360: 4, L0662: 4, L0747: 4, L0759: 4, L0755: 3, S0408: 2, H0575: 2, S0474: 2, H0251: 2, H0673: 2, L0766: 2, L0804: 2, L0665: 2, |
| | | | | L0608: 2, H0543: 2, H0171: 1, H0686: 1, H0613: 1, H0427: 1, L0021: 1, T0082: 1, H0309: 1, H0150: 1, H0024: 1, L0163: 1, |
| | | | | H0266: 1, H0271: 1, S0338: 1, H0252: 1, H0615: 1, H0428: 1, H0030: 1, H0040: 1, H0647: 1, L0369: 1, L0500: 1, L0769: 1, L0638: 1, |
| | | | | L0637: 1, L0764: 1, L0767: 1, L0768: 1, L0364: 1, L0794: 1, L0649: 1, L0775: 1, L0805: 1, L0659: 1, L0382: 1, L0666: 1, S0052: 1, |
| | | | | H0697: 1, S0328: 1, S0330: 1, S0380: 1, H0521: 1, S0406: 1, H0478: 1, L0754: 1, L0745: 1, L0749: 1, L0779: 1, L0780: 1, L0752: 1, |
| | | | | S0031: 1, L0601: 1, S0242: 1 and H0542: 1. |
| | HSDFJ26 | 836071 | 283 | |
| 149 | HSDSB09 | 1301498 | 159 | AR060: 10, AR089: 9, AR055: 7, AR104: 7, AR313: 5, AR039: 4, AR218: 4, AR299: 4, AR184: 4, AR316: 4, AR096: 4, AR182: 4, |
| | | | | AR219: 3, AR294: 3, AR185: 3, AR214: 3, AR197: 3, AR291: 3, AR212: 3, AR251: 3, AR284: 3, AR283: 3, AR282: 3, AR222: 3, |
| | | | | AR269: 3, AR286: 3, AR298: 2, AR266: 2, AR052: 2, AR262: 2, AR249: 2, AR311: 2, AR292: 2, AR309: 2, AR295: 2, AR233: 2, |
| | | | | AR236: 2, AR296: 2, AR268: 2, AR267: 2, AR253: 2, AR270: 2, AR255: 2, AR183: 2, AR285: 2, AR165: 2, AR177: 2, AR228: 2, |
| | | | | AR289: 2, AR061: 2, AR186: 2, AR300: 2, AR168: 2, AR033: 2, AR239: 2, AR235: 1, AR231: 1, AR215: 1, AR277: 1, AR225: 1, |
| | | | | AR290: 1, AR274: 1, AR293: 1, AR163: 1, AR247: 1, AR310: 1, AR217: 1, AR226: 1, AR238: 1, AR240: 1, AR265: 1, AR237: 1, |
| | | | | AR264: 1, AR224: 1, AR229: 1, AR053: 1, AR172: 1, AR271: 1 L0803: 14, L0774: 4, L0770: 2, H0409: 1, H0331: 1 and H0555: 1. |
| | HSDSB09 | 463645 | 284 | |
| 150 | HSDSE75 | 545057 | 160 | AR096: 3, AR225: 3, AR266: 3, AR055: 3, AR060: 3, AR309: 2, AR170: 2, AR222: 2, AR104: 2, AR214: 2, AR254: 2, AR163: 2, |
| | | | | AR161: 2, AR195: 2, AR282: 2, AR089: 1, AR224: 1, AR283: 1, AR275: 1, AR228: 1, AR162: 1, AR300: 1, AR272: 1, AR216: 1, |
| | | | | AR240: 1, AR290: 1, AR175: 1, AR185: 1, AR201: 1, AR193: 1, AR200: 1, AR164: 1, AR166: 1, AR316: 1, AR168: 1, AR230: 1, |
| | | | | AR165: 1, AR218: 1 H0646: 2, L0783: 2, L0751: 2, H0222: 1, L3645: 1, H0409: 1, H0559: 1, H0590: 1, H0581: 1, L0471: 1, |
| | | | | H0622: 1, H0316: 1, H0623: 1, L0788: 1, H0689: 1, S0328: 1, S0390: 1, L0777: 1, L0731: 1 and L0462: 1. |
| 151 | HSIDJ81 | 589447 | 161 | AR313: 41, AR039: 35, AR096: 26, AR173: 25, AR299: 21, AR258: 20, AR180: 20, AR185: 19, AR089: 18, AR262: 18, AR161: 18, |
| | | | | AR162: 18, AR179: 18, AR269: 17, AR240: 17, AR300: 17, AR175: 17, AR163: 17, AR257: 17, AR165: 17, AR191: 17, AR229: 17, |
| | | | | AR196: 16, AR164: 16, AR247: 16, AR316: 16, AR166: 15, AR218: 15, AR183: 15, AR277: 15, AR178: 14, AR181: 14, AR199: 14, |
| | | | | AR182: 13, AR234: 13, AR270: 13, AR293: 13, AR236: 13, AR174: 13, AR233: 12, AR200: 12, AR238: 12, AR268: 11, AR189: 11, |
| | | | | AR260: 11, AR285: 11, AR060: 11, AR219: 11, AR297: 11, AR294: 10, AR104: 10, AR203: 10, AR226: 10, AR188: 10, AR287: 10, |
| | | | | AR255: 10, AR296: 10, AR176: 10, AR177: 10, AR267: 10, AR282: 9, AR230: 9, AR275: 9, AR290: 8, AR264: 8, AR231: 8, |
| | | | | AR261: 8, AR237: 8, AR242: 8, AR190: 8, AR192: 8, AR288: 7, AR274: 7, AR286: 7, AR055: 7, AR291: 7, AR228: 7, AR239: 7, |
| | | | | AR235: 7, AR033: 7, AR295: 6, AR227: 6, AR263: 6, AR266: 6, AR197: 5, AR211: 5, AR308: 5, AR053: 5, AR256: 5, AR250: 5, |
| | | | | AR232: 4, AR210: 4, AR272: 4, AR213: 4, AR283: 4, AR271: 4, AR289: 4, AR312: 4, AR252: 4, AR193: 4, AR212: 3, AR223: 3, |
| | | | | AR246: 3, AR311: 3, AR225: 3, AR061: 3, AR169: 3, AR205: 3, AR198: 3, AR170: 2, AR215: 2, AR201: 2, AR207: 2, AR243: 2, |
| | | | | AR309: 2, AR224: 2, AR171: 2, AR168: 2, AR217: 2, AR216: 2, AR172: 2, AR195: 1 H0036: 1 and L0744: 1. |
| 152 | HSKDA27 | 1352409 | 162 | AR039: 106, AR104: 103, AR055: 103, AR240: 102, AR060: 87, AR096: 84, AR282: 77, AR283: 67, AR300: 66, AR316: 57, |
| | | | | AR185: 48, AR219: 45, AR218: 44, AR089: 40, AR299: 36, AR277: 34, AR313: 31 S0212: 13, S0126: 12, L0777: 11, S0027: 10, |
| | | | | S0028: 10, S0250: 7, H0717: 6, L0662: 6, L0747: 6, S0360: 5, S0022: 5, S0206: 5, L0779: 5, S0194: 5, L0659: 4, L0751: 4, L0731: 4, |
| | | | | L0758: 4, H0713: 3, H0716: 3, S0444: 3, H0599: 3, L0163: 3, S0210: 3, L0807: 3, S0390: 3, S0037: 3, S3014: 3, L0740: 3, S0192: 3, |
| | | | | H0295: 2, H0486: 2, H0706: 2, H0309: 2, H0023: 2, H0373: 2, H0266: 2, H0039: 2, H0038: 2, L0598: 2, L3872: 2, H0689: 2, |
| | | | | L0757: 2, L0759: 2, L0599: 2, S0011: 2, S0040: 1, L2906: 1, S0298: 1, H0661: 1, H0663: 1, H0662: 1, S0420: 1, S0356: 1, S0442: 1, |
| | | | | S0408: 1, L2338: 1, S0046: 1, H0411: 1, H0550: 1, H0586: 1, H0587: 1, H0333: 1, T0040: 1, T0060: 1, H0427: 1, H0251: 1, H0150: 1, |
| | | | | H0050: 1, H0014: 1, H0188: 1, S0214: 1, H0428: 1, H0622: 1, T0006: 1, H0553: 1, H0628: 1, H0124: 1, H0087: 1, H0551: 1, |
| | | | | T0067: 1, H0413: 1, T0069: 1, S0440: 1, L0762: 1, L0763: 1, L0770: 1, L0769: 1, L0637: 1, L0773: 1, L0768: 1, L0794: 1, L0386: 1, |
| | | | | L0774: 1, L0775: 1, L0375: 1, L0805: 1, L0776: 1, L0655: 1, L0783: 1, L0519: 1, L0367: 1, L0790: 1, L0666: 1, L0663: 1, L2263: 1, |
| | | | | L0565: 1, S0148: 1, H0726: 1, H0724: 1, L0438: 1, H0519: 1, S0152: 1, S0454: 1, H0521: 1, H0696: 1, S3012: 1, S0124: 1, L0439: 1, |
| | | | | L0750: 1, H0595: 1, S0436: 1, H0668: 1, H0667: 1, S0242: 1, S0276: 1 and L3603: 1. |
| | HSKDA27 | 1074734 | 285 | |
| | HSKDA27 | 872570 | 286 | |
| 153 | HSKGN81 | 676075 | 163 | AR252: 303, AR263: 240, AR211: 227, AR272: 220, AR210: 215, AR216: 184, AR253: 180, AR250: 170, AR264: 169, |
| | | | | AR242: 163, AR172: 160, AR245: 160, AR274: 155, AR254: 148, AR247: 147, AR313: 142, AR165: 141, AR053: 139, |
| | | | | AR225: 136, AR195: 131, AR215: 129, AR221: 129, AR308: 124, AR197: 123, AR214: 123, AR212: 122, AR170: 119, |
| | | | | AR166: 118, AR224: 118, AR213: 117, AR171: 115, AR205: 113, AR312: 113, AR162: 109, AR217: 108, AR309: 106, |
| | | | | AR199: 106, AR271: 105, AR164: 100, AR198: 93, AR168: 92, AR169: 92, AR188: 92, AR207: 91, AR275: 91, AR173: 91, |
| | | | | AR256: 90, AR291: 89, AR240: 89, AR163: 86, AR296: 82, AR246: 82, AR222: 81, AR311: 78, AR290: 78, AR223: 77, AR282: 76 |
| | | | | AR161: 75, AR297: 75, AR289: 75, AR196: 74, AR261: 73, AR243: 71, AR178: 70, AR295: 70, AR260: 69, AR175: 67, AR183: 66, |
| | | | | AR200: 65, AR174: 63, AR285: 63, AR201: 62, AR096: 61, AR299: 60, AR179: 59, AR189: 59, AR288: 56, AR180: 56, AR033: 55, |
| | | | | AR258: 55, AR266: 55, AR300: 55, AR267: 54, AR181: 51, AR192: 51, AR262: 51, AR293: 50, AR268: 50, AR255: 49, AR204: 48, |
| | | | | AR270: 47, AR316: 47, AR039: 46, AR190: 43, AR238: 43, AR235: 43, AR182: 42, AR089: 41, AR229: 40, AR236: 39, AR269: 39, |
| | | | | AR277: 38, AR232: 38, AR061: 38, AR219: 37, AR218: 37, AR257: 37, AR286: 37, AR185: 37, AR203: 36, AR287: 35, AR283: 35, |
| | | | | AR191: 35, AR193: 34, AR230: 34, AR231: 33, AR177: 32, AR239: 30, AR176: 30, AR237: 29, AR234: 27, AR104: 27, AR226: 26, |
| | | | | AR294: 25, AR060: 24, AR055: 18, AR233: 17, AR227: 14, AR228: 10 H0556: 14, L0666: 5, L0438: 5, L0439: 5, L0751: 5, |
| | | | | H0266: 4, L0665: 4, L0777: 4, H0161: 3, H0645: 3, H0599: 3, H0594: 3, L0763: 3, H0436: 3, L0747: 3, L0758: 3, L0759: 3, H0423: 3, |
| | | | | H0265: 2, H0141: 2, S0045: 2, S0476: 2, H0575: 2, H0421: 2, T0041: 2, H0529: 2, L0770: 2, L0771: 2, L0657: 2, L5623: 2, L0664: 2, |
| | | | | H0670: 2, H0518: 2, S0044: 2, L0749: 2, L0757: 2, L0588: 2, L0599: 2, H0585: 1, L3643: 1, H0717: 1, H0716: 1, H0740: 1, H0583: 1, |
| | | | | S0116: 1, H0341: 1, H0254: 1, H0255: 1, H0306: 1, H0402: 1, S0360: 1, S0408: 1, S0046: 1, S0132: 1, H0619: 1, H0549: 1, H0550: 1, |
| | | | | S0222: 1, H0614: 1, H0392: 1, H0455: 1, H0613: 1, H0592: 1, H0586: 1, H0587: 1, S0005: 1, H0497: 1, H0492: 1, H0486: 1, |
| | | | | H0250: 1, T0071: 1, H0581: 1, H0052: 1, H0309: 1, H0545: 1, H0050: 1, L0471: 1, H0024: 1, L0183: 1, H0267: 1, H0687: 1, |
| | | | | H0286: 1, H0328: 1, L0483: 1, L0053: 1, H0628: 1, H0169: 1, H0674: 1, S0366: 1, H0038: 1, H0634: 1, H0264: 1, H0488: 1, |
| | | | | H0268: 1, H0100: 1, T0042: 1, H0494: 1, S0014: 1, H0625: 1, H0509: 1, H0641: 1, S0002: 1, L0637: 1, L3905: 1, L0646: 1, L0773: 1, |
| | | | | H0662: 1, L0768: 1, L0652: 1, L0776: 1, L0659: 1, L0783: 1, S0374: 1, H0783: 1, H0593: 1, S0126: 1, H0659: 1, H0658: 1, H0648: 1, |
| | | | | H0672: 1, S3012: 1, S0028: 1, L0754: 1, L0750: 1, L0731: 1, S0260: 1, S0436: 1, L0596: 1, L0581: 1, S0242: 1, S0194: 1, H0543: 1, |
| | | | | S0446: 1, H0506: 1 and H0008: 1. |
| | HSKGN81 | 409905 | 287 | |
| 154 | HSNAD72 | 467397 | 164 | AR170: 5, AR169: 4, AR180: 4, AR313: 4, AR221: 3, AR178: 3, AR223: 3, AR245: 3, AR192: 3, AR235: 2, AR204: 2, AR182: 2, |
| | | | | AR299: 2, AR216: 2, AR291: 2, AR274: 2, AR171: 2, AR214: 2, AR217: 2, AR193: 2, AR266: 1, AR308: 1, AR293: 1, AR257: 1, |
| | | | | AR247: 1, AR232: 1, AR225: 1, AR283: 1, AR210: 1, AR282: 1 H0163: 2 |
| 155 | HSNMC45 | 1352201 | 165 | AR242: 8, AR205: 6, AR238: 6, AR170: 6, AR207: 5, AR201: 4, AR215: 3, AR204: 3, AR096: 3, AR296: 3, AR172: 2, AR233: 2, |
| | | | | AR089: 2, AR182: 2, AR055: 2, AR257: 2, AR299: 1, AR104: 1, AR272: 1, AR210: 1, AR185: 1, AR297: 1 H0163: 1 |
| | HSNMC45 | 545060 | 288 | |
| 156 | HSQFP66 | 460537 | 166 | AR197: 9, AR271: 8, AR176: 7, AR162: 7, AR161: 7, AR201: 7, AR163: 7, AR192: 6, AR204: 6, AR207: 6, AR266: 6, AR267: 6, |
| | | | | AR228: 6, AR229: 6, AR169: 6, AR177: 6, AR237: 6, AR198: 6, AR233: 5, AR245: 5, AR181: 5, AR193: 5, AR250: 5, AR243: 5, |
| | | | | AR053: 5, AR269: 5, AR239: 5, AR309: 5, AR089: 5, AR180: 5, AR264: 5, AR165: 5, AR214: 5, AR182: 4, AR060: 4, AR224: 4, |
| | | | | AR061: 4, AR268: 4, AR261: 4, AR178: 4, AR166: 4, AR230: 4, AR257: 4, AR226: 4, AR183: 4, AR164: 4, AR270: 4, AR275: 4, |
| | | | | AR231: 4, AR236: 4, AR096: 4, AR179: 4, AR246: 4, AR289: 4, AR039: 4, AR055: 4, AR293: 4, AR196: 4, AR175: 4, AR316: 4, |
| | | | | AR272: 4, AR234: 4, AR168: 4, AR225: 4, AR286: 4, AR247: 4, AR312: 4, AR212: 4, AR255: 4, AR296: 4, AR242: 4, AR294: 3, |
| | | | | AR300: 3, AR290: 3, AR185: 3, AR205: 3, AR291: 3, AR238: 3, AR262: 3, AR227: 3, AR295: 3, AR287: 3, AR288: 3, AR174: 3, |
| | | | | AR297: 3, AR216: 3, AR311: 3, AR277: 3, AR170: 3, AR191: 3, AR285: 3, AR188: 3, AR213: 3, AR215: 3, AR313: 3, AR217: 3, |
| | | | | AR308: 3, AR232: 3, AR203: 3, AR195: 3, AR282: 3, AR173: 2, AR033: 2, AR172: 2, AR189: 2, AR171: 2, AR274: 2, AR223: 2, |
| | | | | AR190: 2, AR299: 2, AR104: 2, AR211: 2, AR258: 2, AR200: 2, AR283: 2, AR263: 2, AR256: 2, AR221: 2, AR199: 2, AR240: 2, |
| | | | | AR222: 2, AR210: 2, AR253: 1, AR254: 1, AR1260: 1, AR219: 1, AR218: 1 S0007: 1, H0555: 1 and S0026: 1. |
| 157 | HSRFZ57 | 892171 | 167 | AR225: 4, AR309: 4, AR060: 4, AR192: 3, AR235: 3, AR162: 3, AR055: 3, AR161: 3, AR163: 3, AR215: 3, AR275: 3; AR169: 3, |
| | | | | AR254: 3, AR217: 3, AR233: 2, AR170: 2, AR177: 2, AR181: 2, AR236: 2, AR255: 2, AR228: 2, AR180: 2, AR289: 2, AR237: 2, |
| | | | | AR243: 2, AR239: 2, AR166: 2, AR285: 2, AR266: 2, AR272: 2, AR287: 2, AR222: 2, AR274: 2, AR176: 2, AR061: 2, AR271: 2, |
| | | | | AR223: 2, AR247: 2, AR214: 1, AR224: 1, AR240: 1, AR172: 1, AR213: 1, AR283: 1, AR262: 1, AR295: 1, AR033: 1, AR089: 1, |
| | | | | AR174: 1, AR229: 1, AR216: 1, AR234: 1, AR238: 1, AR231: 1, AR316: 1, AR218: 1, AR300: 1, AR293: 1 S0022: 4 |
| 158 | HSUBW09 | 413246 | 168 | AR186: 66, AR202: 60, AR259: 59, AR206: 59, AR292: 58, AR061: 56, AR052: 56, AR283: 51, AR227: 49, AR251: 49, AR244: 48, |
| | | | | AR249: 47, AR281: 45, AR310: 44, AR280: 44, AR033: 43, AR055: 42, AR194: 42, AR192: 41, AR241: 41, AR273: 40, AR300: 40, |
| | | | | AR314: 38, AR185: 38, AR248: 38, AR315: 37, AR104: 36, AR232: 36, AR299: 35, AR233: 34, AR229: 34, AR237: 34, AR275: 34, |
| | | | | AR184: 33, AR060: 32, AR265: 31, AR039: 31, AR177: 29, AR198: 28, AR053: 28, AR294: 28, AR282: 27, AR243: 26, AR256: 26, |
| | | | | AR309: 25, AR313: 25, AR231: 25, AR246: 25, AR295: 25, AR298: 24, AR089: 24, AR219: 24, AR096: 24, AR274: 24, AR312: 23, |
| | | | | AR204: 23, AR293: 22, AR284: 22, AR267: 21, AR205: 21, AR316: 21, AR271: 21, AR247: 20, AR226: 20, AR238: 19, AR213: 19, |
| | | | | AR175: 19, AR234: 18, AR218: 17, AR253: 16, AR289: 16, AR277: 14, AR258: 14, AR179: 13, AR266: 12, AR286: 12, AR263: 12, |
| | | | | AR285: 12, AR296: 12, AR183: 11, AR291: 11, AR270: 10, AR240: 9, AR182: 9, AR268: 8, AR269: 8, AR290: 8, AR163: 5, |
| | | | | AR287: 4, AR176: 3, AR250: 3, AR215: 3, AR225: 2, AR201: 2, AR172: 2, AR224: 2, AR221: 2, AR272: 2, AR264: 2, AR214: 1, |
| | | | | AR165: 1, AR195: 1, AR193: 1, AR257: 1, AR216: 1 L0766: 5, L0749: 3, S0134: 2, L0770: 2, L0794: 2, L0809: 2, L0790: 2, |
| | | | | AR0556: 1, H0735: 1, L0622: 1, H0457: 1, H0561: 1, L0662: 1, L0804: 1, L5622: 1, H0436: 1, L0779: 1, L0731: 1, L0758: 1, H0136: 1 |
| | | | | and H0506: 1. |
| 159 | HSVBU91 | 596868 | 169 | AR215: 6, AR207: 5, AR162: 4, AR161: 4, AR163: 4, AR309: 4, AR271: 4, AR266: 4, AR165: 4, AR176: 4, AR164: 4, AR272: 3, |
| | | | | AR039: 3, AR192: 3, AR213: 3, AR253: 3, AR166: 3, AR264: 3, AR089: 3, AR282: 3, AR204: 3, AR235: 3, AR205: 3, AR313: 3, |
| | | | | AR053: 3, AR201: 2, AR224: 2, AR178: 2, AR275: 2, AR181: 2, AR267: 2, AR182: 2, AR269: 2, AR277: 2, AR104: 2, AR286: 2, |
| | | | | AR246: 2, AR287: 2, AR289: 2, AR033: 2, AR243: 2, AR237: 2, AR230: 2, AR223: 2, AR268: 2, AR293: 2, AR180: 2, AR060: 2, |
| | | | | AR175: 2, AR198: 2, AR229: 2, AR177: 2, AR270: 2, AR233: 2, AR183: 2, AR228: 2, AR261: 2, AR239: 2, AR316: 2, AR285: 2, |
| | | | | AR179: 2, AR232: 1, AR231: 1, AR312: 1, AR061: 1, AR288: 1, AR257: 1, AR096: 1, AR291: 1, AR225: 1, AR226: 1, AR294: 1, |
| | | | | AR295: 1, AR185: 1, AR311: 1, AR227: 1, AR234: 1, AR174: 1, AR203: 1, AR297: 1, AR173: 1, AR191: 1, AR247: 1, AR308: 1, |
| | | | | AR238: 1, AR216: 1, AR255: 1, AR170: 1 H0309: 1 |
| 160 | HTAEE28 | 1018291 | 170 | AR170: 5, AR169: 4, AR221: 3, AR250: 3, AR217: 3, AR242: 2, AR263: 2, AR171: 2, AR193: 2, AR245: 2, AR201: 2, AR172: 2, |
| | | | | AR183: 2, AR300: 2, AR216: 1, AR267: 1, AR309: 1, AR257: 1, AR269: 1, AR224: 1, AR168: 1, AR161: 1, AR215: 1, AR311: 1 |
| | | | | H0250: 3, H0069: 2, L0771: 2, S0404: 2, H0650: 1, H0656: 1, H0486: 1, H0013: 1, H0318: 1, S0422: 1, L0644: 1, L0768: 1, L0794: 1, |
| | | | | L0804: 1, L0655: 1, L0789: 1, L0664: 1, H0436: 1 and L0758: 1. |
| | HTABE28 | 882919 | 289 | |
| | HTAEE28 | 864120 | 290 | |
| 161 | HTECC05 | 1352365 | 171 | AR176: 5, AR169: 3, A2R224: 3, AR180: 3, AR291: 3, AR225: 3, AR238: 3, AR267: 3, AR261: 2, AR245: 2, AR289: 2, AR270: 2, |
| | | | | AR257: 2, AR175: 2, AR269: 2, AR168: 2, AR181: 2, AR228: 2, AR243: 2, AR309: 2, AR285: 2, AR295: 2, AR217: 2, AR230: 2, |
| | | | | AR293: 2, AR239: 2, AR171: 2, AR177: 2, AR294: 2, AR236: 2, AR313: 1, AR296: 1, AR231: 1, AR290: 1, AR190: 1, AR227: 1, |
| | | | | AR179: 1, AR246: 1, AR312: 1, AR287: 1, AR247: 1, AR271: 1, AR266: 1, AR178: 1, AR250: 1, AR061: 1, AR182: 1, AR268: 1, |
| | | | | AR233: 1, AR196: 1, AR262: 1, AR234: 1, AR272: 1, AR162: 1, AR277: 1, AR096: 1 H0617: 10, S0410: 8, L0758: 8, L0769: 7, |
| | | | | AR038: 6, L0439: 6, L0750: 6, L0752: 6, S0360: 5, L0775: 5, S0406: 5, H0150: 4, L0157: 4, H0620: 4, H0087: 4, S0440: 4, S0344: 4, |
| | | | | L0763: 4, S0328: 4, L0747: 4, H0224: 3, H0484: 3, H0402: 3, S0049: 3, H0708: 3, L0773: 3, L0805: 3, L0809: 3, L0519: 3, H0670: 3, |
| | | | | L0748: 3, L0731: 3, L0757: 3, L0581: 3, H0295: 2, H0341: 2, S0444: 2, S0222: 2, L0622: 2, H0253: 2, H0309: 2, T0115: 2, H0544: 2, |
| | | | | H0545: 2, H0081: 2, H0012: 2, H0673: 2, S0036: 2, H0616: 2, L0770: 2, L0774: 2, L0518: 2, H0725: 2, S0374: 2, H0696: 2, L0588: 2, |
| | | | | H0543: 2, L0615: 1, H0160: 1, H0225: 1, H0713: 1, S6024: 1, S0430: 1, H0656: 1, S0116: 1, S0212: 1, H0483: 1, H0306: 1, H0638: 1, |
| | | | | H0125: 1, S0420: 1, S0358: 1, S0408: 1, H0637: 1, S0476: 1, H0640: 1, H0411: 1, S0278: 1, H0441: 1, H0461: 1, H0298: 1, H0333: 1, |
| | | | | L0623: 1, H0486: 1, H0427: 1, H0156: 1, H0599: 1, T0082: 1, T0048: 1, H0318: 1, H0581: 1, H0196: 1, H0597: 1, L0738: 1, |
| | | | | H0530: 1, H0242: 1, H0024: 1, H0373: 1, L0163: 1, H0275: 1, H0188: 1, H0284: 1, S0003: 1, H0428: 1, H0213: 1, H0405: 1, |
| | | | | H0181: 1, H0182: 1, H0606: 1, L0055: 1, H0163: 1, H0063: 1, T0067: 1, H0100: 1, H0560: 1, H0561: 1, H0647: 1, S0142: 1, |
| | | | | L0598: 1, L3904: 1, L0761: 1, L0772: 1, L0764: 1, L0767: 1, L0768: 1, L0766: 1, L0649: 1, L0803: 1, L0375: 1, L0806: 1, L0776: 1, |
| | | | | H0517: 1, L0526: 1, L0783: 1, L0789: 1, H0144: 1, L0438: 1, H0689: 1, H0690: 1, H0682: 1, H0683: 1, H0435: 1, H0659: 1, H0648: 1, |
| | | | | H0521: 1, H0522: 1, S3014: 1, S0027: 1, L0755: 1, L0759: 1, H0445: 1, H0343: 1, H0595: 1, L0608: 1, H0136: 1, S0276: 1, H0542: 1, |
| | | | | L0600: 1 and H0352: 1. |
| | HTECC05 | 877448 | 291 | |
| | HTECC05 | 666743 | 292 | |
| 162 | HTEEB42 | 206980 | 172 | AR174: 12, AR191: 12, AR190: 11, AR244: 11, AR181: 11, AR291: 10, AR186: 10, AR180: 10, AR175: 10, AR192: 10, AR189: 9, |
| | | | | AR176: 9, AR240: 9, AR269: 9, AR241: 9, AR178: 9, AR270: 9, AR177: 8, AR266: 8, AR268: 8, AR183: 8, AR273: 8, AR274: 8, |
| | | | | AR165: 8, AR247: 7, AR164: 7, AR198: 7, AR184: 7, AR166: 7, AR162: 7, AR202: 7, AR161: 7, AR163: 7, AR246: 7, AR245: 6, |
| | | | | AR197: 6, AR289: 6, AR173: 6, AR201: 6, AR267: 6, AR182: 6, AR271: 6, AR052: 6, AR206: 6, AR309: 6, AR185: 6, AR188: 6, |
| | | | | AR275: 6, AR263: 6, AR251: 5, AR236: 5, AR284: 5, AR194: 5, AR295: 5, AR255: 5, AR235: 5, AR277: 5, AR299: 5, AR179: 5, |
| | | | | AR055: 5, AR290: 5, AR104: 5, AR033: 5, AR193: 5, AR228: 4, AR230: 4, AR204: 4, AR196: 4, AR170: 4, AR285: 4, AR256: 4, |
| | | | | AR172: 4, AR272: 4, AR257: 4, AR262: 4, AR205: 4, AR233: 4, AR308: 4, AR261: 4, AR195: 4, AR252: 4, AR300: 4, AR223: 4, |
| | | | | AR089: 4, AR287: 4, AR238: 4, AR243: 4, AR214: 4, AR296: 4, AR237: 4, AR265: 4, AR250: 4, AR239: 4, AR288: 4, AR298: 4, |
| | | | | AR224: 3, AR294: 3, AR229: 3, AR248: 3, AR316: 3, AR207: 3, AR286: 3, AR312: 3, AR297: 3, AR264: 3, AR199: 3, AR061: 3, |
| | | | | AR293: 3, AR053: 3, AR227: 3, AR060: 3, AR311: 3, AR211: 3, AR249: 3, AR225: 3, AR292: 3, AR219: 3, AR258: 3, AR039: 3, |
| | | | | AR215: 3, AR313: 3, AR282: 3, AR226: 3, AR260: 3, AR231: 2, AR242: 2, AR203: 2, AR171: 2, AR168: 2, AR210: 2, AR200: 2, |
| | | | | AR259: 2, AR234: 2, AR096: 2, AR232: 2, AR169: 2, AR222: 2, AR254: 2, AR218: 2, AR221: 2, AR253: 2, AR283: 2, AR213: 1, |
| | | | | AR216: 1, AR217: 1, AR310: 1 L0794: 4, H0624: 2, H0038: 2, L0375: 2, S0330: 2, L0750: 2, L0779: 2, H0031: 1, H0644: 1, |
| | | | | H0124: 1, H0591: 1, H0616: 1, H0264: 1, H0623: 1, L0770: 1, L0637: 1, L0805: 1, L0663: 1, L0749: 1, L0777: 1, L0780: 1 and |
| | | | | L0599: 1. |
| 163 | HTEFU65 | 543396 | 173 | AR240: 15, AR055: 12, AR060: 7, AR039: 6, AR299: 6, AR219: 6, AR277: 5, AR089: 5, AR218: 5, AR300: 5, AR185: 5, AR104: 5, |
| | | | | AR283: 4, AR282: 4, AR316: 4, AR096: 3, AR313: 3 H0486: 3, H0253: 1, H0544: 1, H0012: 1, S0388: 1, H0553: 1, H0090: 1, |
| | | | | H0038: 1, H0652: 1, L0769: 1, L0641: 1, L0806: 1, H0696: 1, L0748: 1, L0749: 1, S0031: 1 and S0196: 1. |
| 164 | HTELP17 | 836072 | 174 | AR263: 33, AR223: 32, AR214: 31, AR309: 30, AR224: 29, AR264: 29, AR283: 27, AR308: 27, AR222: 27, AR169: 25, AR235: 25, |
| | | | | AR172: 25, AR277: 24, AR212: 23, AR053: 23, AR168: 23, AR213: 22, AR171: 22, AR316: 21, AR221: 21, AR311: 21, AR261: 21, |
| | | | | AR217: 20, AR089: 20, AR170: 20, AR055: 19, AR219: 19, AR282: 19, AR165: 19, AR312: 19, AR162: 19, AR225: 19, AR216: 19, |
| | | | | AR161: 18, AR164: 18, AR176: 18, AR218: 18, AR033: 18, AR295: 18, AR163: 18, AR207: 18, AR104: 18, AR096: 17, AR236: 17, |
| | | | | AR166: 17, AR215: 16, AR299: 16, AR177: 16, AR240: 16, AR060: 16, AR196: 15, AR288: 15, AR266: 15, AR300: 15, AR269: 15, |
| | | | | AR039: 15, AR200: 15, AR181: 15, AR313: 15, AR291: 14, AR178: 14, AR293: 14, AR185: 14, AR272: 14, AR286: 14, AR253: 13, |
| | | | | AR210: 13, AR294: 13, AR270: 13, AR296: 13, AR285: 13, AR227: 13, AR239: 13, AR297: 13, AR233: 12, AR174: 12, AR245: 12, |
| | | | | AR183: 12, AR252: 12, AR192: 12, AR230: 12, AR226: 12, AR287: 12, AR175: 12, AR257: 12, AR195: 12, AR258: 12, AR274: 12, |
| | | | | AR229: 11, AR289: 11, AR237: 11, AR179: 11, AR267: 11, AR255: 11, AR247: 11, AR061: 11, AR262: 11, AR290: 11, AR231: 11, |
| | | | | AR191: 11, AR275: 11, AR268: 11, AR180: 10, AR182: 10, AR199: 10, AR234: 10, AR204: 10, AR205: 10, AR173: 10, AR188: 10, |
| | | | | AR228: 10, AR232: 10, AR238: 9, AR198: 9, AR190: 9, AR197: 9, AR203: 9, AR256: 9, AR189: 8, AR254: 8, AR250: 8, AR246: 7, |
| | | | | AR211: 7, AR193: 7, AR260: 7, AR243: 7, AR201: 7, AR271: 6, AR242: 5 L0758: 3, S0408: 2, H0031: 2, H0038: 2, L0766: 2, |
| | | | | H0521: 2, L0748: 2, H0341: 1, L3659: 1, S0476: 1, H0581: 1, S0051: 1, H0266: 1, H0111: 1, H0616: 1, L0794: 1, L0805: 1, L0787: 1, |
| | | | | L0779: 1, L0759: 1, L0593: 1, H0542: 1 and H0543: 1. |
| 165 | HTELS08 | 847090 | 175 | AR235: 6, AR215: 6, AR242: 5, AR162: 4, AR161: 4, AR192: 4, AR165: 4, AR053: 4, AR163: 4, AR269: 4, AR164: 4, AR291: 4, |
| | | | | AR288: 4, AR166: 4, AR176: 4, AR221: 4, AR257: 4, AR282: 3, AR236: 3, AR217: 3, AR264: 3, AR261: 3, AR196: 3, AR178: 3, |
| | | | | AR270: 3, AR177: 3, AR272: 3, AR181: 3, AR255: 3, AR297: 3, AR294: 3, AR172: 3, AR182: 3, AR295: 3, AR296: 3, AR055: 3, |
| | | | | AR060: 3, AR285: 3, AR179: 3, AR240: 3, AR191: 3, AR287: 3, AR216: 3, AR293: 3, AR175: 3, AR183: 3, AR225: 3, AR313: 3, |
| | | | | AR199: 3, AR180: 3, AR238: 3, AR233: 3, AR195: 3, AR223: 2, AR239: 2, AR228: 2, AR173: 2, AR168: 2, AR311: 2, AR262: 2, |
| | | | | AR290: 2, AR263: 2, AR237: 2, AR268: 2, AR188: 2, AR266: 2, AR033: 2, AR229: 2, AR247: 2, AR207: 2, AR277: 2, AR286: 2, |
| | | | | AR174: 2, AR300: 2, AR267: 2, AR193: 2, AR250: 2, AR230: 2, AR258: 2, AR189: 2, AR246: 2, AR289: 2, AR096: 2, AR231: 2, |
| | | | | AR283: 2, AR185: 2, AR089: 2, AR222: 2, AR275: 2, AR308: 2, AR201: 2, AR260: 2, AR190: 2, AR316: 2, AR312: 2, AR061: 2, |
| | | | | AR226: 2, AR243: 2, AR299: 2, AR104: 2, AR171: 1, AR200: 1, AR219: 1, AR309: 1, AR227: 1, AR203: 1, AR256: 1, AR039: 1, |
| | | | | AR234: 1, AR169: 1, AR232: 1 H0616: 2, L0758: 2 and H0038: 1. |
| 166 | HTLEP53 | 634852 | 176 | AR173: 20, AR262: 20, AR313: 19, AR196: 16, AR161: 16, AR162: 15, AR175: 15, AR163: 15, AR258: 15, AR165: 15, AR164: 14, |
| | | | | AR166: 14, AR178: 13, AR257: 13, AR300: 13, AR179: 13, AR181: 12, AR233: 12, AR229: 12, AR174: 12, AR183: 12, AR247: 12, |
| | | | | AR240: 11, AR234: 11, AR177: 11, AR191: 11, AR200: 10, AR236: 10, AR293: 10, AR242: 10, AR199: 10, AR269: 10, AR182: 10, |
| | | | | AR180: 10, AR260: 9, AR255: 9, AR275: 8, AR238: 8, AR264: 8, AR228: 8, AR270: 8, AR261: 8, AR188: 8, AR297: 8, AR231: 8, |
| | | | | AR185: 8, AR226: 8, AR294: 8, AR296: 8, AR176: 8, AR312: 8, AR287: 8, AR203: 7, AR219: 7, AR268: 7, AR290: 7, AR230: 7, |
| | | | | AR033: 7, AR267: 7, AR274: 7, AR096: 7, AR237: 7, AR213: 7, AR189: 7, AR285: 6, AR286: 6, AR288: 6, AR197: 6, AR295: 6, |
| | | | | AR053: 6, AR212: 6, AR308: 6, AR291: 6, AR204: 6, AR218: 6, AR266: 6, AR309: 6, AR198: 6, AR089: 5, AR235: 5, AR282: 5, |
| | | | | AR193: 5, AR170: 5, AR299: 5, AR263: 5, AR239: 5, AR256: 5, AR210: 5, AR190: 5, AR277: 5, AR289: 5, AR316: 5, AR169: 4, |
| | | | | AR217: 4, AR192: 4, AR060: 4, AR201: 4, AR223: 4, AR227: 4, AR245: 4, AR171: 4, AR252: 4, AR243: 4, AR221: 4, AR232: 4, |
| | | | | AR211: 4, AR061: 4, AR272: 4, AR271: 3, AR311: 3, AR195: 3, AR205: 3, AR039: 3, AR172: 3, AR250: 3, AR214: 2, AR207: 2, |
| | | | | AR055: 2, AR168: 2, AR222: 2, AR283: 2, AR224: 2, AR104: 2, AR215: 2, AR216: 1, AR225: 1 H0253: 1 |
| 167 | HTPCS72 | 854941 | 177 | AR219: 14, AR218: 13, AR104: 11, AR240: 9, AR060: 8, AR055: 7, AR299: 7, AR096: 7, AR316: 7, AR185: 6, AR313: 6, |
| | | | | AR089: 6, AR300: 6, AR039: 5, AR283: 4, AR282: 4, AR277: 2 L0438: 6, L0439: 5, H0661: 3, L0776: 3, H0556: 2, H0100: 2, |
| | | | | L0598: 2, L0764: 2, L0766: 2, H0672: 2, L0777: 2, L0731: 2, H0170: 1, H0171: 1, H0265: 1, H0140: 1, S0114: 1, H0657: 1, H0656: 1, |
| | | | | H0638: 1, S0418: 1, S0408: 1, H0730: 1, H0741: 1, S0046: 1, H0411: 1, S0278: 1, H0550: 1, S0222: 1, T0104: 1, H0600: 1, S0280: 1, |
| | | | | S0474: 1, H0007: 1, T0110: 1, H0046: 1, H0457: 1, H0150: 1, H0566: 1, H0620: 1, H0057: 1, H0039: 1, H0030: 1, L0055: 1, |
| | | | | H0090: 1, H0413: 1, H0623: 1, H0059: 1, H0647: 1, H0529: 1, L0770: 1, L0646: 1, L0645: 1, L0521: 1, L0794: 1, L0650: 1, L0659: 1, |
| | | | | L5623: 1, L0789: 1, L0666: 1, L0663: 1, L0664: 1, H0144: 1, H0547: 1, S0152: 1, L0740: 1, L0747: 1, L0750: 1, L0756: 1, L0779: 1, |
| | | | | L0757: 1, L0758: 1, L0595: 1 and H0422: 1. |
| | HTPCS72 | 566683 | 293 | |
| 168 | HTPIH83 | 919916 | 178 | AR176: 5, AR180: 5, AR266: 5, AR182: 5, AR223: 4, AR267: 4, AR183: 4, AR233: 4, AR269: 4, AR181: 4, AR228: 4, AR236: 4, |
| | | | | AR245: 4, AR224: 4, AR169: 3, AR225: 3, AR238: 3, AR231: 3, AR168: 3, AR257: 3, AR229: 3, AR161: 3, AR162: 3, AR177: 3, |
| | | | | AR293: 3, AR237: 3, AR221: 3, AR289: 3, AR163: 3, AR268: 3, AR239: 3, AR215: 3, AR261: 3, AR288: 3, AR170: 3, AR175: 3, |
| | | | | AR226: 3, AR174: 3, AR199: 3, AR290: 3, AR179: 2, AR191: 2, AR255: 2, AR264: 2, AR234: 2, AR061: 2, AR217: 2, AR240: 2, |
| | | | | AR282: 2, AR216: 2, AR294: 2, AR060: 2, AR196: 2, AR287: 2, AR172: 2, AR173: 2, AR178: 2, AR285: 2, AR295: 2, AR200: 2, |
| | | | | AR291: 2, AR222: 2, AR190: 2, AR247: 2, AR189: 2, AR309: 2, AR203: 2, AR188: 2, AR300: 2, AR230: 2, AR311: 2, AR296: 2, |
| | | | | AR262: 2, AR171: 2, AR275: 2, AR235: 1, AR232: 1, AR227: 1, AR258: 1, AR286: 1, AR033: 1, AR297: 1, AR039: 1, AR256: 1, |
| | | | | AR316: 1, AR313: 1, AR089: 1, AR185: 1, AR277: 1 H0622: 7, S0360: 3, L0809: 3, L0804: 2, L0774: 2, L0775: 2, L0748: 2, |
| | | | | H0484: 1, H0014: 1, S0440: 1, L0646: 1, L0643: 1, L0374: 1, L0764: 1, L0771: 1, L0773: 1, L0662: 1, L0803: 1 and L0788: 1. |
| | HTPIH83 | 895024 | 294 | |
| | HTPIH83 | 898088 | 295 | |
| 169 | HTSEW17 | 460579 | 179 | AR170: 7, AR161: 7, AR162: 7, AR163: 7, AR182: 7, AR225: 6, AR176: 6, AR282: 5, AR228: 5, AR223: 5, AR266: 5, AR180: 5, |
| | | | | AR224: 5, AR178: 5, AR269: 5, AR181: 5, AR261: 5, AR309: 5, AR233: 5, AR250: 5, AR191: 5, AR216: 4, AR257: 4, AR231: 4, |
| | | | | AR267: 4, AR236: 4, AR268: 4, AR274: 4, AR229: 4, AR270: 4, AR214: 4, AR179: 4, AR239: 4, AR165: 4, AR288: 4, AR247: 4, |
| | | | | AR263: 4, AR089: 4, AR255: 4, AR237: 4, AR061: 4, AR164: 4, AR287: 3, AR275: 3, AR240: 3, AR177: 3, AR096: 3, AR264: 3, |
| | | | | AR174: 3, AR166: 3, AR183: 3, AR234: 3, AR293: 3, AR291: 3, AR295: 3, AR173: 3, AR300: 3, AR168: 3, AR200: 3, AR299: 3, |
| | | | | AR190: 3, AR221: 3, AR196: 3, AR296: 3, AR290: 3, AR316: 3, AR294: 3, AR262: 3, AR175: 3, AR297: 3, AR185: 3, AR238: 3, |
| | | | | AR313: 3, AR060: 3, AR230: 3, AR055: 3, AR039: 3, AR283: 3, AR286: 3, AR227: 3, AR260: 2, AR172: 2, AR285: 2, AR053: 2, |
| | | | | AR308: 2, AR217: 2, AR311: 2, AR188: 2, AR277: 2, AR203: 2, AR226: 2, AR272: 2, AR232: 2, AR192: 2, AR222: 2, AR189: 2, |
| | | | | AR201: 2, AR213: 2, AR312: 2, AR258: 2, AR193: 2, AR289: 2, AR171: 2, AR199: 2, AR256: 1, AR219: 1, AR212: 1, AR215: 1, |
| | | | | AR211: 1, AR033: 1, AR218: 1 H0087: 1, S0002: 1, L0769: 1, L0789: 1, H0683: 1, H0670: 1, L0748: 1, L0749: 1, L0752: 1 and |
| | | | | L0758: 1. |
| 170 | HTTBI76 | 637725 | 180 | AR252: 4, AR214: 4, AR309: 3, AR169: 3, AR297: 3, AR193: 3, AR250: 3, AR271: 3, AR291: 3, AR161: 3, AR272: 2, AR033: 2, |
| | | | | AR294: 2, AR217: 2, AR221: 2, AR223: 2, AR312: 2, AR168: 2, AR163: 2, AR261: 2, AR181: 2, AR210: 1, AR197: 1, AR225: 1, |
| | | | | AR205: 1, AR267: 1, AR270: 1, AR165: 1, AR222: 1, AR216: 1, AR170: 1, AR295: 1, AR166: 1, AR213: 1, L0803: 4, L0731: 4, |
| | | | | L0774: 3, S0380: 3, S0028: 3, L0758: 3, H0486: 2, S0003: 2, H0040: 2, S0344: 2, L0766: 2, L0775: 2, H0547: 2, L0748: 2, L0756: 2, |
| | | | | L0777: 2, L0780: 2, L0753: 2, S0011: 2, H0716: 1, H0638: 1, L0617: 1, S0358: 1, H0411: 1, S0280: 1, H0318: 1, H0355: 1, H0674: 1, |
| | | | | H0212: 1, H0135: 1, H0038: 1, H0132: 1, S0142: 1, S0002: 1, H0529: 1, L0804: 1, L0632: 1, H0682: 1, H0684: 1, H0525: 1, |
| | | | | S0044: 1, S0406: 1, H0555: 1, L0747: 1, L0750: 1, L0752: 1, L0755: 1, L0604: 1 and S0026: 1. |
| 171 | HTTBS64 | 1008159 | 181 | AR282: 4, AR252: 4, AR269: 3, AR171: 3, AR170: 3, AR264: 2, AR176: 2, AR291: 2, AR311: 2, AR225: 2, AR277: 2, AR168: 2, |
| | | | | AR270: 2, AR172: 2, AR262: 1, AR271: 1, AR055: 1, AR272: 1, AR299: 1, AR257: 1, AR313: 1 H0040: 1. |
| | HTTBS64 | 863187 | 296 | |
| | HTTBS64 | 754125 | 297 | |
| 172 | HTXJM03 | 603918 | 182 | AR313: 13, AR252: 10, AR282: 8, AR312: 7, AR176: 7, AR096: 7, AR269: 6, AR254: 6, AR201: 6, AR196: 6, AR245: 6, AR250: 6, |
| | | | | AR270: 6, AR197: 6, AR053: 6, AR161: 6, AR162: 6, AR180: 6, AR089: 6, AR163: 6, AR169: 6, AR191: 5, AR170: 5, AR240: 5, |
| | | | | AR165: 5, AR178: 5, AR183: 5, AR290: 5, AR164: 5, AR166: 5, AR300: 5, AR257: 5, AR039: 5, AR264: 5, AR229: 5, AR203: 5, |
| | | | | AR266: 5, AR268: 5, AR267: 5, AR255: 5, AR181: 5, AR236: 5, AR297: 5, AR233: 4, AR296: 4, AR309: 4, AR182: 4, AR193: 4, |
| | | | | AR228: 4, AR179: 4, AR175: 4, AR188: 4, AR247: 4, AR316: 4, AR173: 4, AR177: 4, AR293: 4, AR271: 4, AR231: 4, AR213: 4, |
| | | | | AR060: 4, AR225: 4, AR308: 4, AR212: 4, AR243: 4, AR285: 4, AR200: 4, AR199: 4, AR192: 4, AR287: 4, AR189: 4, AR294: 4, |
| | | | | AR286: 4, AR238: 4, AR299: 3, AR291: 3, AR295: 3, AR239: 3, AR261: 3, AR237: 3, AR263: 3, AR198: 3, AR283: 3, AR172: 3, |
| | | | | AR185: 3, AR216: 3, AR204: 3, AR288: 3, AR311: 3, AR234: 3, AR205: 3, AR262: 3, AR258: 3, AR289: 3, AR055: 3, AR277: 3, |
| | | | | AR224: 3, AR207: 3, AR230: 3, AR168: 3, AR226: 3, AR223: 3, AR061: 3, AR190: 2, AR174: 2, AR218: 2, AR227: 2, AR195: 2, |
| | | | | AR256: 2, AR274: 2, AR260: 2, AR217: 2, AR235: 2, AR033: 2, AR246: 2, AR275: 2, AR171: 2, AR219: 2, AR104: 2, AR232: 1, |
| | | | | AR253: 1, AR211: 1, AR210: 1, AR242: 1 L0766: 5, H0313: 3, H0624: 1, H0265: 1, H0556: 1, S0116: 1, H0329: 1, H0486: 1, |
| | | | | H0156: 1, H0590: 1, H0009: 1, S0250: 1, H0169: 1, S0450: 1, S0002: 1, L0769: 1, L0793: 1, L0532: 1, L0750: 1, L0777: 1 and |
| | | | | S0424: 1. |
| 173 | HTXON32 | 838288 | 183 | AR195: 107, AR197: 91, AR172: 81, AR246: 78, AR295: 74, AR272: 72, AR258: 71, AR196: 67, AR224: 67, AR235: 67, |
| | | | | AR171: 66, AR193: 66, AR291: 63, AR297: 59, AR223: 58, AR168: 57, AR200: 56, AR263: 55, AR222: 54, AR170: 53, AR261: 53, |
| | | | | AR245: 52, AR236: 52, AR169: 52, AR311: 49, AR256: 49, AR225: 49, AR188: 48, AR173: 48, AR285: 48, AR288: 47, AR221: 46, |
| | | | | AR260: 46, AR198: 46, AR313: 46, AR174: 45, AR201: 45, AR271: 45, AR191: 44, AR175: 44, AR217: 44, AR286: 44, AR287: 43, |
| | | | | AR309: 43, AR270: 43, AR264: 42, AR211: 42, AR274: 42, AR308: 41, AR199: 41, AR181: 40, AR294: 40, AR214: 39, AR262: 39, |
| | | | | AR216: 39, AR243: 39, AR189: 39, AR275: 38, AR177: 38, AR215: 38, AR033: 38, AR255: 37, AR296: 37, AR210: 36, AR190: 36, |
| | | | | AR257: 36, AR289: 35, AR213: 35, AR282: 34, AR240: 34, AR218: 34, AR163: 32, AR247: 32, AR176: 31, AR180: 30, AR312: 30, |
| | | | | AR254: 30, AR212: 30, AR166: 29, AR300: 29, AR162: 29, AR293: 29, AR203: 29, AR183: 29, AR219: 28, AR161: 28, AR192: 28, |
| | | | | AR242: 28, AR165: 27, AR250: 27, AR269: 27, AR185: 27, AR164: 26, AR039: 25, AR104: 25, AR266: 24, AR290: 24, AR316: 24, |
| | | | | AR179: 23, AR182: 23, AR178: 23, AR096: 22, AR238: 21, AR053: 21, AR205: 20, AR268: 20, AR089: 20, AR207: 19, AR267: 19, |
| | | | | AR299: 19, AR204: 19, AR229: 18, AR234: 18, AR226: 17, AR277: 17, AR231: 17, AR253: 16, AR237: 15, AR232: 14, AR230: 14, |
| | | | | AR233: 14, AR060: 13, AR283: 11, AR239: 10, AR055: 9, AR061: 9, AR228: 9, AR252: 8, AR227: 6 H0556: 1 |
| 174 | HUFCJ30 | 638402 | 184 | AR277: 9, AR207: 8, AR215: 7, AR192: 7, AR170: 6, AR223: 6, AR282: 6, AR235: 6, AR216: 6, AR225: 6, AR165: 6, AR169: 6, |
| | | | | AR171: 6, AR164: 5, AR245: 5, AR168: 5, AR166: 5, AR198: 5, AR222: 5, AR089: 5, AR242: 5, AR183: 5, AR195: 5, AR221: 5, |
| | | | | AR193: 4, AR224: 4, AR214: 4, AR313: 4, AR252: 4, AR172: 4, AR243: 4, AR236: 4, AR201: 4, AR299: 4, AR295: 4, AR246: 4, |
| | | | | AR238: 4, AR264: 4, AR176: 4, AR161: 4, AR240: 4, AR162: 4, AR309: 4, AR204: 4, AR263: 4, AR163: 4, AR261: 4, AR217: 4, |
| | | | | AR297: 4, AR316: 3, AR285: 3, AR182: 3, AR269: 3, AR270: 3, AR205: 3, AR308: 3, AR197: 3, AR060: 3, AR311: 3, AR230: 3, |
| | | | | AR055: 3, AR173: 3, AR196: 3, AR250: 3, AR288: 3, AR272: 3, AR213: 3, AR234: 3, AR181: 3, AR312: 3, AR283: 3, AR199: 3, |
| | | | | AR180: 3, AR033: 3, AR266: 3, AR175: 3, AR254: 3, AR177: 3, AR262: 3, AR296: 3, AR300: 3, AR268: 3, AR290: 3, AR231: 3, |
| | | | | AR287: 3, AR247: 3, AR294: 3, AR191: 3, AR275: 3, AR291: 2, AR237: 2, AR228: 2, AR179: 2, AR174: 2, AR096: 2, AR289: 2, |
| | | | | AR178: 2, AR233: 2, AR229: 2, AR286: 2, AR255: 2, AR226: 2, AR185: 2, AR293: 2, AR200: 2, AR188: 2, AR189: 2, AR227: 2, |
| | | | | AR257: 2, AR212: 2, AR203: 2, AR239: 2, AR104: 2, AR053: 2, AR061: 2, AR258: 2, AR039: 2, AR232: 2, AR271: 2, AR218: 2, |
| | | | | AR219: 2, AR260: 2, AR190: 2, AR267: 2, AR210: 1 L0777: 7, L0751: 3, L0766: 2, L0438: 2, L0779: 2, H0352: 2, H0351: 1, |
| | | | | S0222: 1, H0333: 1, H0687: 1, H0646: 1, L0770: 1, L0642: 1, L0662: 1, L0803: 1, L0375: 1, L0805: 1, L0653: 1, L0659: 1, L0790: 1, |
| | | | | L0663: 1, L0664: 1, L0665: 1 and H0506: 1. |
| 175 | HUVEB53 | 571200 | 185 | AR053: 3, AR171: 3, AR224: 3, AR180: 2, AR168: 2, AR207: 2, AR165: 2, AR282: 2, AR217: 2, AR299: 2, AR234: 1, AR277: 1, |
| | | | | AR296: 1, AR295: 1, AR164: 1, AR261: 1, AR166: 1, AR204: 1, AR225: 1, AR257: 1, AR283: 1, AR269: 1, AR183: 1 H0171: 3, |
| | | | | L0754: 3, H0431: 2, H0196: 2, H0546: 2, H0623: 2, H0539: 2, H0696: 2, L0744: 2, L0748: 2, L0749: 2, L0758: 2, L0759: 2, S0398: 2, |
| | | | | H0624: 1, T0002: 1, S0040: 1, H0341: 1, S0360: 1, H0580: 1, H0587: 1, H0574: 1, H0486: 1, H0036: 1, S0665: 1, H0123: 1, H0014: 1, |
| | | | | S6028: 1, S0214: 1, H0553: 1, H0032: 1, L0455: 1, H0598: 1, H0038: 1, H0616: 1, H0056: 1, S0386: 1, S0112: 1, T0042: 1, S0344: 1, |
| | | | | S0422: 1, S0002: 1, L0775: 1, L0806: 1, L0805: 1, L0776: 1, S0152: 1, H0704: 1, H0555: 1, H0436: 1, L0439: 1, L0751: 1, L0752: 1, |
| | | | | L0731: 1, L0588: 1, L0592: 1, S0026: 1, H0543: 1 and H0423: 1. |
| 176 | HWAAD63 | 838626 | 186 | AR196: 17, AR173: 14, AR161: 14, AR162: 14, AR241: 14, AR163: 14, AR165: 13, AR313: 12, AR166: 12, AR164: 12, AR262: 12, |
| | | | | AR264: 11, AR236: 11, AR199: 10, AR191: 10, AR174: 9, AR178: 9, AR257: 9, AR235: 9, AR180: 9, AR263: 8, AR203: 8, |
| | | | | AR181: 8, AR200: 8, AR229: 8, AR274: 7, AR189: 7, AR275: 7, AR311: 7, AR240: 7, AR247: 7, AR297: 7, AR312: 7, AR175: 7, |
| | | | | AR308: 7, AR212: 7, AR261: 7, AR169: 7, AR265: 7, AR188: 7, AR234: 6, AR177: 6, AR221: 6, AR194: 6, AR287: 6, AR242: 6, |
| | | | | AR258: 6, AR207: 6, AR230: 6, AR255: 6, AR176: 6, AR293: 6, AR168: 6, AR271: 6, AR224: 6, AR179: 6, AR270: 6, AR185: 6, |
| | | | | AR192: 6, AR233: 5, AR198: 5, AR300: 5, AR096: 5, AR214: 5, AR216: 5, AR183: 5, AR238: 5, AR272: 5, AR269: 5, AR039: 5, |
| | | | | AR226: 5, AR223: 5, AR299: 5, AR296: 5, AR215: 5, AR285: 5, AR260: 5, AR089: 5, AR288: 5, AR182: 4, AR204: 4, AR239: 4, |
| | | | | AR228: 4, AR222: 4, AR213: 4, AR309: 4, AR231: 4, AR060: 4, AR033: 4, AR210: 4, AR252: 4, AR273: 4, AR286: 4, AR053: 4, |
| | | | | AR268: 4, AR294: 4, AR237: 4, AR193: 4, AR172: 4, AR243: 4, AR218: 4, AR267: 4, AR277: 4, AR310: 4, AR104: 3, AR295: 3, |
| | | | | AR291: 3, AR190: 3, AR225: 3, AR282: 3, AR316: 3, AR227: 3, AR290: 3, AR171: 3, AR217: 3, AR186: 3, AR211: 3, AR266: 3, |
| | | | | AR195: 3, AR219: 3, AR249: 3, AR292: 3, AR052: 3, AR201: 3, AR206: 2, AR245: 2, AR314: 2, AR232: 2, AR202: 2, AR298: 2, |
| | | | | AR289: 2, AR315: 2, AR256: 2, AR244: 2, AR259: 2, AR205: 2, AR246: 2, AR061: 1, AR184: 1, AR284: 1, AR280: 1, AR283: 1, |
| | | | | AR055: 1 H0441: 1, H0581: 1 and H0604: 1. |
| | HWAAD63 | 833089 | 298 | |
| | HWAAD63 | 793875 | 299 | |
| 177 | HWADJ89 | 799506 | 187 | AR252: 29, AR250: 29, AR253: 21, AR254: 10, AR282: 6, AR215: 6, AR165: 5, AR164: 5, AR166: 5, AR089: 5, AR161: 5, |
| | | | | AR246: 5, AR162: 5, AR271: 5, AR240: 5, AR053: 5, AR163: 5, AR263: 4, AR243: 4, AR274: 4, AR195: 4, AR205: 4, AR313: 4, |
| | | | | AR096: 4, AR299: 4, AR180: 4, AR213: 4, AR193: 4, AR214: 4, AR169: 4, AR300: 4, AR311: 4, AR264: 4, AR192: 4, AR173: 4, |
| | | | | AR207: 4, AR312: 3, AR285: 3, AR171: 3, AR309: 3, AR060: 3, AR275: 3, AR308: 3, AR196: 3, AR272: 3, AR316: 3, AR269: 3, |
| | | | | AR257: 3, AR261: 3, AR170: 3, AR270: 3, AR183: 3, AR242: 3, AR245: 3, AR296: 3, AR199: 3, AR287: 3, AR295: 3, AR175: 3, |
| | | | | AR033: 3, AR172: 3, AR222: 2, AR188: 2, AR039: 2, AR185: 2, AR290: 2, AR286: 2, AR247: 2, AR238: 2, AR191: 2, AR297: 2, |
| | | | | AR178: 2, AR268: 2, AR291: 2, AR262: 2, AR200: 2, AR235: 2, AR104: 2, AR283: 2, AR212: 2, AR210: 2, AR288: 2, AR203: 2, |
| | | | | AR201: 2, AR174: 2, AR277: 2, AR182: 2, AR197: 2, AR189: 2, AR255: 2, AR294: 2, AR229: 2, AR230: 2, AR293: 2, AR258: 2, |
| | | | | AR216: 2, AR236: 2, AR224: 2, AR181: 2, AR190: 2, AR239: 2, AR228: 2, AR227: 2, AR233: 2, AR234: 1, AR177: 1, AR231: 1, |
| | | | | AR179: 1, AR061: 1, AR266: 1, AR055: 1, AR226: 1, AR221: 1, AR289: 1, AR232: 1 H0581: 1 |
| 178 | HWBFX31 | 799427 | 188 | AR171: 3, AR309: 2, AR271: 2, AR282: 2, AR225: 2, AR205: 2, AR267: 2, AR213: 2, AR257: 2, AR236: 2, AR053: 1, AR266: 1, |
| | | | | AR179: 1, AR199: 1, AR270: 1, AR214: 1, AR181: 1, AR240: 1, AR247: 1, AR277: 1 L0659: 5, L0794: 4, L0809: 4, L0777: 4, |
| | | | | H0424: 3, L0766: 3, L0745: 3, H0265: 2, H0656: 2, H0254: 2, H0662: 2, S0376: 2, H0457: 2, H0024: 2, L0768: 2, H0670: 2, |
| | | | | H0555: 2, L0751: 2, L0780: 2, H0556: 1, H0218: 1, H0224: 1, H0638: 1, S0360: 1, H0675: 1, S0408: 1, H0580: 1, H0586: 1, H0575: 1, |
| | | | | H0545: 1, H0050: 1, H0188: 1, H0252: 1, H0039: 1, H0617: 1, H0316: 1, H0063: 1, H0087: 1, H0264: 1, H0272: 1, H0652: 1, |
| | | | | S0002: 1, S0426: 1, L0763: 1, L0770: 1, L0761: 1, L0800: 1, L0773: 1, L0648: 1, L0662: 1, L0774: 1, L0784: 1, L0776: 1, L0647: 1, |
| | | | | L0790: 1, L0666: 1, L0664: 1, L0665: 1, L0438: 1, H0521: 1, H0522: 1, L0749: 1, L0750: 1, L0752: 1, L0757: 1, L0759: 1, L0596: 1, |
| | | | | H0422: 1, S0458: 1 and H0677: 1. |

[0125] Table 1C summarizes additional polynucleotides encompassed by the invention (including cDNA clones related to the sequences (Clone ID:), contig sequences (contig identifier (Contig ID:) contig nucleotide sequence identifiers (SEQ ID NO:X)), and genomic sequences (SEQ ID NO:B). The first column provides a unique clone identifier, “Clone ID:”, for a cDNA clone related to each contig sequence. The second column provides the sequence identifier, “SEQ ID NO:X”, for each contig sequence. The third column provides a unique contig identifier, “Contig ID:” for each contig sequence. The fourth column, provides a BAC identifier “BAC ID NO:A” for the BAC clone referenced in the corresponding row of the table. The fifth column provides the nucleotide sequence identifier, “SEQ ID NO:B” for a fragment of the BAC clone identified in column four of the corresponding row of the table. The sixth column, “Exon From-To”, provides the location (i.e., nucleotide position numbers) within the polynucleotide sequence of SEQ ID NO:B which delineate certain polynucleotides of the invention that are also exemplary members of polynucleotide sequences that encode polypeptides of the invention (e.g., polypeptides containing amino acid sequences encoded by the polynucleotide sequences delineated in column six, and fragments and variants thereof).

TABLE 1C

| | SEQ | | | | |
|---|---|---|---|---|---|
| | ID | | | | |
| cDNA Clone | NO: | CONTIG | | SEQ ID | EXON |
| ID | X | ID: | BAC ID: A | NO: B | From-To |
| HAUAI83 | 22 | 639009 | AC010422 | 589 | 1-326 |
| | | | | | 1552-2084 |
| | | | | | 2162-2261 |
| | | | | | 2300-2427 |
| | | | | | 4485-5868 |
| | | | | | 5948-6362 |
| | | | | | 7914-8017 |
| | | | | | 8569-8681 |
| | | | | | 8765-8875 |
| | | | | | 8968-9037 |
| | | | | | 9284-9499 |
| | | | | | 9742-9910 |
| | | | | | 10837-11187 |
| | | | | | 11271-11321 |
| | | | | | 11554-11707 |
| | | | | | 11783-12766 |
| | | | | | 12866-13225 |
| | | | | | 13256-13827 |
| | | | | | 14284-14367 |
| | | | | | 14890-15090 |
| HAUAI83 | 22 | 639009 | AC018761 | 590 | 1-326 |
| | | | | | 1176-1284 |
| | | | | | 1552-2084 |
| | | | | | 2162-2261 |
| | | | | | 2300-2426 |
| | | | | | 4485-5868 |
| | | | | | 5948-6362 |
| | | | | | 8569-8681 |
| | | | | | 8765-8875 |
| | | | | | 8968-9037 |
| | | | | | 9284-9499 |
| | | | | | 9742-9910 |
| | | | | | 10317-10501 |
| | | | | | 10837-11187 |
| | | | | | 11271-11321 |
| | | | | | 11554-11707 |
| | | | | | 11783-12766 |
| | | | | | 12866-13225 |
| | | | | | 13256-13827 |
| | | | | | 14284-14367 |
| | | | | | 14890-15090 |
| HAUAI83 | 22 | 639009 | AC010422 | 591 | 1-315 |
| | | | | | 2004-2289 |
| | | | | | 2650-2741 |
| | | | | | 3554-3830 |
| HAUAI83 | 22 | 639009 | AC010422 | 592 | 1-202 |
| | | | | | 938-1047 |
| | | | | | 1219-1395 |
| | | | | | 1758-1956 |
| | | | | | 2907-3429 |
| | | | | | 3792-3935 |
| | | | | | 5366-5485 |
| | | | | | 6391-6688 |
| | | | | | 6899-7269 |
| | | | | | 7890-8316 |
| | | | | | 8400-8524 |
| | | | | | 8607-8682 |
| | | | | | 8824-8999 |
| | | | | | 9190-9302 |
| | | | | | 9691-9796 |
| | | | | | 10106-10177 |
| | | | | | 10571-11051 |
| | | | | | 11164-11490 |
| | | | | | 12565-12696 |
| | | | | | 13364-13501 |
| | | | | | 13964-14592 |
| | | | | | 14740-15540 |
| | | | | | 15610-15798 |
| | | | | | 15947-16642 |
| | | | | | 16717-16832 |
| | | | | | 16968-17408 |
| | | | | | 17521-17612 |
| | | | | | 18331-18579 |
| | | | | | 19120-19303 |
| | | | | | 19358-19514 |
| | | | | | 19599-19702 |
| | | | | | 20003-20245 |
| HAUAI83 | 22 | 639009 | AC018761 | 593 | 1-202 |
| | | | | | 938-1047 |
| | | | | | 1219-1395 |
| | | | | | 1758-1956 |
| | | | | | 2907-3429 |
| | | | | | 3792-3935 |
| | | | | | 5366-5485 |
| | | | | | 6391-6688 |
| | | | | | 6899-7269 |
| | | | | | 7591-7711 |
| | | | | | 7890-8316 |
| | | | | | 8400-8524 |
| | | | | | 8607-8682 |
| | | | | | 8749-9073 |
| | | | | | 9190-9302 |
| | | | | | 9691-9796 |
| HAUAI83 | 22 | 639009 | AC018761 | 594 | 1-82 |
| | | | | | 128-293 |
| | | | | | 1178-1447 |
| | | | | | 1986-2278 |
| | | | | | 2457-2711 |
| | | | | | 3543-3844 |
| HBINS58 | 26 | 1352386 | AL096774 | 595 | 1-1023 |
| | | | | | 2010-2239 |
| | | | | | 2581-2962 |
| | | | | | 3153-3223 |
| | | | | | 3324-3493 |
| | | | | | 3973-4126 |
| HBINS58 | 26 | 1352386 | AL096774 | 596 | 1-341 |
| HBINS58 | 26 | 1352386 | AL096774 | 597 | 1-142 |
| HCE3G69 | 29 | 728432 | AC068946 | 598 | 1-108 |
| | | | | | 1186-1324 |
| | | | | | 1746-1835 |
| | | | | | 2138-2284 |
| | | | | | 2448-2545 |
| | | | | | 2718-2861 |
| | | | | | 3091-5889 |
| HCE3G69 | 29 | 728432 | AC068946 | 599 | 1-191 |
| HCE3G69 | 29 | 728432 | AC068946 | 600 | 1-686 |
| HCEFB80 | 31 | 1143407 | AL022327 | 601 | 1-2271 |
| | | | | | 3506-3658 |
| | | | | | 4643-4810 |
| | | | | | 9039-9164 |
| | | | | | 9382-9509 |
| | | | | | 10587-10720 |
| | | | | | 11135-11195 |
| | | | | | 11265-11716 |
| | | | | | 14644-15466 |
| | | | | | 17451-17526 |
| | | | | | 18012-18114 |
| | | | | | 20530-20632 |
| | | | | | 20957-21009 |
| | | | | | 23696-23785 |
| | | | | | 25338-25575 |
| | | | | | 25969-26166 |
| HCNDR47 | 34 | 1016919 | AL122003 | 602 | 1-236 |
| | | | | | 531-696 |
| | | | | | 787-817 |
| | | | | | 863-4508 |
| | | | | | 5158-5744 |
| | | | | | 6949-7029 |
| HCNDR47 | 34 | 1016919 | AL122003 | 603 | 1-888 |
| | | | | | 1304-2003 |
| | | | | | 2830-3284 |
| | | | | | 3719-4571 |
| | | | | | 4618-5268 |
| | | | | | 6131-6557 |
| | | | | | 8947-9033 |
| | | | | | 9058-9726 |
| | | | | | 14176-14480 |
| | | | | | 18456-18915 |
| | | | | | 18960-19871 |
| | | | | | 22365-22454 |
| | | | | | 23082-23248 |
| | | | | | 28058-28215 |
| HDPGT01 | 44 | 771583 | AC020978 | 604 | 1-180 |
| | | | | | 2776-2899 |
| | | | | | 3916-4077 |
| | | | | | 4296-4335 |
| | | | | | 4436-4632 |
| | | | | | 4895-5181 |
| | | | | | 8153-8246 |
| | | | | | 9547-9666 |
| | | | | | 9907-10007 |
| | | | | | 10370-10618 |
| | | | | | 10788-11046 |
| | | | | | 11926-13423 |
| | | | | | 13465-13494 |
| | | | | | 13764-15689 |
| HDPGT01 | 44 | 771583 | AC020978 | 605 | 1-384 |
| HDPSB18 | 50 | 1043263 | AL355512 | 606 | 1-2572 |
| | | | | | 3049-3871 |
| HDPSB18 | 50 | 1043263 | AC006176 | 607 | 1-2571 |
| | | | | | 3048-3872 |
| HDPSB18 | 50 | 1043263 | AL355512 | 608 | 1-280 |
| HDPXY01 | 55 | 879048 | AL354000 | 609 | 1-1319 |
| | | | | | 4848-4975 |
| | | | | | 5229-5600 |
| | | | | | 6561-6654 |
| HDPXY01 | 55 | 879048 | AL035362 | 610 | 1-1316 |
| | | | | | 4844-4971 |
| | | | | | 5225-5596 |
| | | | | | 6557-6650 |
| HDPXY01 | 55 | 879048 | AL354000 | 611 | 1-460 |
| HDPXY01 | 55 | 879048 | AL354000 | 612 | 1-400 |
| HDPXY01 | 55 | 879048 | AL035362 | 613 | 1-400 |
| HDPXY01 | 55 | 879048 | AL035362 | 614 | 1-460 |
| HHGCG53 | 80 | 340818 | AC024037 | 615 | 1-518 |
| HHGCM76 | 81 | 662329 | AC003665 | 616 | 1-70 |
| | | | | | 304-609 |
| | | | | | 900-1090 |
| | | | | | 1240-1835 |
| | | | | | 2272-2490 |
| | | | | | 2581-3598 |
| HHGCM76 | 81 | 662329 | AC003665 | 617 | 1-580 |
| | | | | | 851-995 |
| | | | | | 1224-1296 |
| | | | | | 1314-1663 |
| | | | | | 1930-1975 |
| | | | | | 2724-2905 |
| | | | | | 2968-3098 |
| | | | | | 3283-3328 |
| | | | | | 5121-5230 |
| | | | | | 5331-5689 |
| HJACG30 | 84 | 895505 | AC018512 | 618 | 1-776 |
| HJACG30 | 84 | 895505 | AC022305 | 619 | 1-878 |
| HJACG30 | 84 | 895505 | AC002518 | 620 | 1-150 |
| HLTIP94 | 105 | 1087335 | AC007431 | 621 | 1-1299 |
| HLTIP94 | 105 | 1087335 | AC007431 | 622 | 1-330 |
| HMSDL37 | 115 | 973996 | AC012086 | 623 | 1-3328 |
| HMSDL37 | 115 | 973996 | AC018811 | 624 | 1-3051 |
| HMSDL37 | 115 | 973996 | AC018494 | 625 | 1-3029 |
| HMSDL37 | 115 | 973996 | AC012086 | 626 | 1-224 |
| HMSDL37 | 115 | 973996 | AC012086 | 627 | 1-468 |
| HMSDL37 | 115 | 973996 | AC018811 | 628 | 1-222 |
| HMSDL37 | 115 | 973996 | AC018811 | 629 | 1-468 |
| HMSDL37 | 115 | 973996 | AC018494 | 630 | 1-224 |
| HMSDL37 | 115 | 973996 | AC018494 | 631 | 1-1854 |
| HNGOI12 | 128 | 1041375 | AC003675 | 632 | 1-2128 |
| HNGOI12 | 128 | 1041375 | AC001228 | 633 | 1-2129 |
| HNGOI12 | 128 | 1041375 | AC013791 | 634 | 1-2132 |
| HNHFM14 | 130 | 664507 | AC020552 | 635 | 1-290 |
| HNHFM14 | 130 | 664507 | AC020552 | 636 | 1-96 |
| HPJBK12 | 147 | 1011467 | AC022033 | 637 | 1-2649 |
| HPJBK12 | 147 | 1011467 | AC013541 | 638 | 1-2649 |
| HPJBK12 | 147 | 1011467 | AC022033 | 639 | 1-190 |
| HPJBK12 | 147 | 1011467 | AC013541 | 640 | 1-190 |
| HPRAL78 | 149 | 1352342 | AC007783 | 641 | 1-2334 |
| | | | | | 2508-3084 |
| | | | | | 3578-3890 |
| | | | | | 4198-4294 |
| | | | | | 4376-4623 |
| | | | | | 4712-5349 |
| | | | | | 5369-6088 |
| | | | | | 6527-7107 |
| | | | | | 7298-7392 |
| | | | | | 7730-7846 |
| | | | | | 9147-9476 |
| | | | | | 10487-10575 |
| | | | | | 10791-11298 |
| | | | | | 11485-11601 |
| | | | | | 11783-13009 |
| | | | | | 13207-13501 |
| | | | | | 13540-13772 |
| | | | | | 14439-14800 |
| | | | | | 14923-14983 |
| | | | | | 15133-15355 |
| | | | | | 15485-15653 |
| | | | | | 16750-16805 |
| | | | | | 16894-17078 |
| | | | | | 17162-17219 |
| | | | | | 18003-18089 |
| | | | | | 21085-21146 |
| | | | | | 21358-21501 |
| HPRAL78 | 149 | 1352342 | AC007783 | 642 | 1-308 |
| HPRAL78 | 149 | 1352342 | AC007783 | 643 | 1-1024 |
| HRGBL78 | 153 | 910133 | AL359541 | 644 | 1-254 |
| | | | | | 2777-3307 |
| | | | | | 3670-3823 |
| | | | | | 4113-4385 |
| | | | | | 4844-5381 |
| | | | | | 5995-7365 |
| HSAWD74 | 156 | 460527 | AC004951 | 645 | 1-1651 |
| | | | | | 1740-2593 |
| HSAWD74 | 156 | 460527 | AC004951 | 646 | 1-149 |
| HSAWD74 | 156 | 460527 | AC004951 | 647 | 1-5057 |
| | | | | | 5082-8353 |
| | | | | | 8404-8996 |
| HTPCS72 | 177 | 854941 | AL008639 | 648 | 1-106 |
| | | | | | 1457-1595 |
| | | | | | 1666-2484 |
| | | | | | 2910-3006 |
| | | | | | 3705-4147 |
| | | | | | 4768-5141 |
| | | | | | 5304-5536 |
| | | | | | 5746-5874 |
| | | | | | 7114-7241 |
| | | | | | 7468-7711 |
| | | | | | 7963-8746 |
| | | | | | 9438-12408 |
| | | | | | 12884-14976 |
| HTPCS72 | 177 | 854941 | AL008639 | 649 | 1-720 |
| HTPIH83 | 178 | 919916 | AL158821 | 650 | 1-1862 |
| | | | | | 1880-3126 |

[0126] Tables 1D: The polynucleotides or polypeptides, or agonists or antagonists of the present invention can be used in assays to test for one or more biological activities. If these polynucleotides and polypeptides do exhibit activity in a particular assay, it is likely that these molecules may be involved in the diseases associated with the biological activity. Thus, the polynucleotides or polypeptides, or agonists or antagonists could be used to treat the associated disease.

[0127] The present invention encompasses methods of detecting, preventing, diagnosing, prognosticating, treating, and/or ameliorating a disease or disorder. In preferred embodiments, the present invention encompasses a method of treating a gastrointestinal disease or disorder comprising administering to a patient in which such detection, treatment, prevention, and/or amelioration is desired a protein, nucleic acid, or antibody of the invention (or fragment or variant thereof) in an amount effective to detect, prevent, diagnose, prognosticate, treat, and/or ameliorate the gastrointestinal disease or disorder.

[0128] In another embodiment, the present invention also encompasses methods of detecting, preventing, diagnosing, prognosticating, treating, and/or ameliorating a gastrointestinal disease or disorder; comprising administering to a patient combinations of the proteins, nucleic acids, or antibodies of the invention (or fragments or variants thereof), sharing similar indications as shown in the corresponding rows in Column 3 of Table 1D.

[0129] Table 1D provides information related to biological activities for polynucleotides and polypeptides of the invention (including antibodies, agonists, and/or antagonists thereof). Table 1D also provides information related to assays which may be used to test polynucleotides and polypeptides of the invention (including antibodies, agonists, and/or antagonists thereof) for the corresponding biological activities. The first column (“Gene No.”) provides the gene number in the application for each clone identifier. The second column (“cDNA Clone ID:”) provides the unique clone identifier for each clone as previously described and indicated in Table 1A through Table 1D. The third column (“AA SEQ ID NO:Y”) indicates the Sequence Listing SEQ ID Number for polypeptide sequences encoded by the corresponding cDNA clones (also as indicated in Tables 1A, Table 1B, and Table 2). The fourth column (“Biological Activity”) indicates a biological activity corresponding to the indicated polypeptides (or polynucleotides encoding said polypeptides). The fifth column (“Exemplary Activity Assay”) further describes the corresponding biological activity and also provides information pertaining to the various types of assays which may be performed to test, demonstrate, or quantify the corresponding biological activity.

[0130] Table 1D describes the use of, inter alia, FMAT technology for testing or demonstrating various biological activities. Fluorometric microvolume assay technology (FMAT) is a fluorescence-based system which provides a means to perform nonradioactive cell- and bead-based assays to detect activation of cell signal transduction pathways. This technology was designed specifically for ligand binding and immunological assays. Using this technology, fluorescent cells or beads at the bottom of the well are detected as localized areas of concentrated fluorescence using a data processing system. Unbound flurophore comprising the background signal is ignored, allowing for a wide variety of homogeneous assays. FMAT technology may be used for peptide ligand binding assays, immunofluorescence, apoptosis, cytotoxicity, and bead-based immunocapture assays. See, Miraglia S et. al., “Homogeneous cell and bead based assays for high throughput screening using flourometric microvolume assay technology,” Journal of Biomolecular Screening; 4:193-204 (1999). In particular, FMAT technology may be used to test, confirm, and/or identify the ability of polypeptides (including polypeptide fragments and variants) to activate signal transduction pathways. For example, FMAT technology may be used to test, confirm and/or identify the ability of polypeptides to up regulate production of immunomodulatory proteins (such as, for example, interleukins, GM-CSF, Rantes, and Tumor Necrosis factors, as well as other cellular regulators (e.g. insulin)).

[0131] Table 1D also describes the use of kinase assays for testing, demonstrating, or quantifying biological activity. In this regard, the phosphorylation and de-phosphorylation of specific amino acid residues (e.g. Tyrosine, Serine, Threonine) on cell-signal transduction proteins provides a fast, reversible means for activation and de-activation of cellular signal transduction pathways. Moreover, cell signal transduction via phosphorylation/de-phosphorylation is crucial to the regulation of a wide variety of cellular processes (e.g. proliferation, differentiation, migration, apoptosis, etc.). Accordingly, kinase assays provide a powerful tool useful for testing, confirming, and/or identifying polypeptides (including polypeptide fragments and variants) that mediate cell signal transduction events via protein phosphorylation. See e.g., Forrer, P., Tamaskovic R., and Jaussi, R. “Enzyme-Linked Immunosorbent Assay for Measurement of JNK, ERK, and p38 Kinase Activities” Biol. Chem. 379(8-9): 1101-1110 (1998).

TABLE 1D

| Gene No. | cDNA Clone ID | AA SEQ ID NO: Y | Biological Activity | Exemplary Activity Assay |
|---|---|---|---|---|
| 1 | H2CBU83 | 300 | Stimulation of | Assays for measuring secretion of insulin are well-known in the art and may be used or routinely |
| | | | insulin secretion | modified to assess the ability of polypeptides of the invention (including antibodies and agonists or |
| | | | from pancreatic beta cells. | antagonists of the invention) to stimulate insulin secretion. For example, insulin secretion is measured by |
| | | | | FMAT using anti-rat insulin antibodies. Insulin secretion from pancreatic beta cells is upregulated by |
| | | | | glucose and also by certain proteins/peptides, and disregulation is a key component in diabetes. |
| | | | | Exemplary assays that may be used or routinely modified to test for stimulation of insulin secretion (from |
| | | | | pancreatic cells) by polypeptides of the invention (including antibodies and agonists or antagonists of the |
| | | | | invention) include assays disclosed in: Ahren, B., et al., Am J Physiol, 277(4 Pt 2): R959-66 (1999); Li, M., et al., |
| | | | | Endocrinology, 138(9): 3735-40 (1997); Kim, K. H., et al., FEBS Lett, 377(2): 237-9 (1995); |
| | | | | and, Miraglia S et. al., Journal of Biomolecular Screening, 4: 193-204 (1999), the contents of each of |
| | | | | which is herein incorporated by reference in its entirety. Pancreatic cells that may be used according to |
| | | | | these assays are publicly available (e.g., through the ATCC) and/or may be routinely generated. |
| | | | | Exemplary pancreatic cells that may be used according to these assays include rat INS-1 cells. INS-1 |
| | | | | cells are a semi-adherent cell line established from cells isolated from an X-ray induced rat transplantable |
| | | | | insulinoma. These cells retain characteristics typical of native pancreatic beta cells including glucose inducible insulin |
| | | | | secretion. References: Asfari et al. Endocrinology 1992 130: 167. |
| 2 | H6EDC19 | 301 | Regulation of | Assays for the regulation of viability and proliferation of cells in vitro are well-known in the art and may |
| | | | viability and | be used or routinely modified to assess the ability of polypeptides of the invention (including antibodies |
| | | | proliferation of | and agonists or antagonists of the invention) to regulate viability and proliferation of pancreatic beta |
| | | | pancreatic beta cells. | cells. For example, the Cell Titer-Glo luminescent cell viability assay measures the number of viable |
| | | | | cells in culture based on quantitation of the ATP present which signals the presence of metabolically |
| | | | | active cells. Exemplary assays that may be used or routinely modified to test regulation of viability and |
| | | | | proliferation of pancreatic beta cells by polypeptides of the invention (including antibodies and agonists |
| | | | | or antagonists of the invention) include assays disclosed in: Friedrichsen BN, et al., Mol Endocrinol, |
| | | | | 15(1): 136-48 (2001); Huotari MA, et al., Endocrinology, 139(4): 1494-9 (1998); Hugl SR, et al., J Bio |
| | | | | Chem 1998 Jul 10; 273(28): 17771-9 (1998), the contents of each of which is herein incorporated by |
| | | | | reference in its entirety. Pancreatic cells that may be used according to these assays are publicly |
| | | | | available (e.g., through the ATCC) and/or may be routinely generated. Exemplary pancreatic cells that |
| | | | | may be used according to these assays include rat INS-1 cells. INS-1 cells are a semi-adherent cell line |
| | | | | established from cells isolated from an X-ray induced rat transplantable insulinoma. These cells retian |
| | | | | characteristics typical of native pancreatic beta cells including glucose inducible insulin secretion. |
| | | | | References: Asfari et al. Endocrinology 1992 130: 167. |
| 3 | HACBD91 | 302 | Activation of | Assays for the activation of transcription through the cAMP response element are well-known in the art |
| | | | transcription | and may be used or routinely modified to assess the ability of polypeptides of the invention (including |
| | | | through cAMP | antibodies and agonists or antagonists of the invention) to increase cAMP, regulate CREB transcription |
| | | | response | factors, and modulate expression of genes involved in a wide variety of cell functions. For example, a |
| | | | element (CRE) | 3T3-L1/CRE reporter assay may be used to identify factors that activate the cAMP signaling pathway. |
| | | | in pre-adipocytes. | CREB plays a major role in adipogenesis, and is involved in differentiation into adipocytes. CRE |
| | | | | contains the binding sequence for the transcription factor CREB (CRE binding protein). Exemplary |
| | | | | assays for transcription through the cAMP response element that may be used or routinely modified to |
| | | | | test cAMP-response element activity of polypeptides of the invention (including antibodies and agonists |
| | | | | or antagonists of the invention) include assays disclosed in Berger et al., Gene 66: 1-10 (1998); Cullen |
| | | | | and Malm, Methods in Enzymol 216: 362-368 (1992); Henthorn et al, Proc Natl Acad Sci USA 85: 6342-6346 |
| | | | | (1988); Reusch et al., Mol Cell Biol 20(3): 1008-1020 (2000); and Klemm et al., J Biol Chem |
| | | | | 273: 917-923 (1998), the contents of each of which are herein incorporated by reference in its entirety. |
| | | | | Pre-adipocytes that may be used according to these assays are publicly available (e.g., through the |
| | | | | ATCC) and/or may be routinely generated. Exemplary mouse adipocyte cells that may be used according |
| | | | | to these assays include 3T3-L1 cells. 3T3-L1 is an adherent mouse preadipocyte cell line that is a |
| | | | | continuous substrain of 3T3 fibroblast cells developed through clonal isolation and undergo a pre- |
| | | | | adipocyte to adipose-like conversion under appropriate differentiation conditions known in the art. |
| 3 | HACBD91 | 302 | Activation of | Assays for the activation of transcription through the cAMP response element are well-known in the art |
| | | | transcription | and may be used or routinely modified to assess the ability of polypeptides of the invention (including |
| | | | through cAMP | antibodies and agonists or antagonists of the invention) to increase cAMP and regulate CREB |
| | | | response | transcription factors, and modulate expression of genes involved in a wide variety of cell functions. |
| | | | element in | Exemplary assays for transcription through the cAMP response element that may be used or routinely |
| | | | immune cells | modified to test cAMP-response element activity of polypeptides of the invention (including antibodies |
| | | | (such as T-cells). | and agonists or antagonists of the invention) include assays disclosed in Berger et al., Gene 66: 1-10 |
| | | | | (1998); Cullen and Malm, Methods in Enzymol 216: 362-368 (1992); Henthorn et al., Proc Natl Acad Sci |
| | | | | USA 85: 6342-6346 (1988); Black et al., Virus Genes 15(2): 105-117 (1997); and Belkowski et al., J |
| | | | | Immunol 161(2): 659-665 (1998), the contents of each of which are herein incorporated by reference in its |
| | | | | entirety. T cells that may be used according to these assays are publicly available (e.g., through the |
| | | | | ATCC). Exemplary mouse T cells that may be used according to these assays include the CTLL cell |
| 3 | HACBD91 | 302 | Production of IL-6 | IL-6 FMAT. IL-6 is produced by T cells and has strong effects on B cells. IL-6 participates in IL-4 |
| | | | | induced IgE production and increases IgA production (IgA plays a role in mucosal immunity). IL-6 |
| | | | | induces cytotoxic T cells. Deregulated expression of IL-6 has been linked to autoimmune disease, |
| | | | | plasmacytomas, myelomas, and chronic hyperproliferative diseases. Assays for immunomodulatory and |
| | | | | differentiation factor proteins produced by a large variety of cells where the expression level is strongly |
| | | | | regulated by cytokines, growth factors, and hormones are well known in the art and may be used or |
| | | | | routinely modified to assess the ability of polypeptides of the invention (including antibodies and |
| | | | | agonists or antagonists of the invention) to mediate immunomodulation and differentiation and modulate |
| | | | | T cell proliferation and function. Exemplary assays that test for immunomodulatory proteins evaluate the |
| | | | | production of cytokines, such as IL-6, and the stimulation and upregulation of T cell proliferation and |
| | | | | functional activities. Such assays that may be used or routinely modified to test immunomodulatory and |
| | | | | diffferentiation activity of polypeptides of the invention (including antibodies and agonists or antagonists |
| | | | | of the invention) include assays disclosed in Miraglia et al., J Biomolecular Screening 4: 193-204(1999); |
| | | | | Rowland et al., “Lymphocytes: a practical approach” Chapter 6: 138-160 (2000); and Verhasselt et al, J |
| | | | | Immunol 158: 2919-2925 (1997), the contents of each of which are herein incorporated by reference in its |
| | | | | entirety. Human dendritic cells that may be used according to these assays may be isolated using |
| | | | | techniques disclosed herein or otherwise known in the art. Human dendritic cells are antigen presenting |
| | | | | cells in suspension culture, which, when activated by antigen and/or cytokines, initiate and upregulate T |
| | | | | cell proliferation and functional activities. |
| 3 | HACBD91 | 302 | Regulation of | Assays for the regulation of transcription of Malic Enzyme are well-known the art and may be used or |
| | | | transcription of | routinely modified to assess the ability of polypeptides of the invention (including antibodies and |
| | | | Malic Enzyme in | agonists or antagonists of the invention) to regulate transcription of Malic Enzyme, a key enzyme in |
| | | | adipocytes | lipogenesis. Malic enzyme is involved in lipogenesisand its expression is stimulted by insulin. ME |
| | | | | promoter contains two direct repeat (DR1)- like elements MEp and MEd identified as putative PPAR |
| | | | | response elements. ME promoter may also responds to AP1 and other transcription factors. Exemplary |
| | | | | assays that may be used or routinely modified to test for regulation of transcription of Malic Enzyme (in |
| | | | | adipoocytes) by polypeptides of the invention (including antibodies and agonists or antagonists of the |
| | | | | invention) include assays disclosed in: Streeper, R. S., et al., Mol Endocrinol, 12(11): 1778-91 1998); |
| | | | | Garcia-Jimenez, C., et al., Mol Endocrinol, 8(10): 1361-9 (1994); Barroso, I., et al., J Biol Chem, |
| | | | | 274(25): 17997-8004 (1999); Ijpenberg, A., et al., J Biol Chem, 272(32): 20108-20117 (1997); Berger, et |
| | | | | al., Gene 66: 1-10 (1988); and, Cullen, B., et al., Methods in Enzymol. 216: 362-368 (1992), the contents |
| | | | | of each of which is herein incorporated by reference in its entirety. Hepatocytes that may be used |
| | | | | according to these assays are publicly available (e.g., through the ATCC) and/or may be routinely |
| | | | | generated. Exemplary hepatocytes that may be used according to these assays includes the H4IIE rat |
| | | | | liver hepatoma cell line. |
| 3 | HACBD91 | 302 | Activation of | Kinase assay. JNK and p38 kinase assays for signal transduction that regulate cell proliferation, |
| | | | Endothelial Cell | activation, or apoptosis are well known in the art and may be used or routinely modified to assess the |
| | | | p38 or JNK | ability of polypeptides of the invention (including antibodies and agonists or antagonists of the invention) |
| | | | Signaling Pathway. | to promote or inhibit cell proliferation, activation, and apoptosis. Exemplary assays for JNK and p38 |
| | | | | kinase activity that may be used or routinely modified to test JNK and p38 kinase-induced activity of |
| | | | | polypeptides of the invention (including antibodies and agonists or antagonists of the invention) include |
| | | | | the assays disclosed in Forrer et al., Biol Chem 379(8-9): 1101-1110 (1998); Gupta et al., Exp Cell Res |
| | | | | 247(2): 495-504 (1999); Kyriakis JM, Biochem Soc Symp 64: 29-48 (1999); Chang and Karin, Nature |
| | | | | 410(6824): 37-40 (2001); and Cobb MH, Prog Biophys Mol Biol 71(3-4): 479-500 (1999); the contents of |
| | | | | each of which are herein incorporated by reference in its entirety. Endothelial cells that may be used |
| | | | | according to these assays are publicly available (e.g., through the ATCC). Exemplary endothelial cells |
| | | | | that may be used according to these assays include human umbilical vein endothelial cells (HUVEC), |
| | | | | which are endothelial cells which line venous blood vessels, and are involved in functions that include, |
| | | | | but are not limited to, angiogenesis, vascular permeability, vascular tone, and immune cell extravasation. |
| 3 | HACBD91 | 302 | Activation of | Assays for the activation of transcription through the CD28 response element are well-known in the art |
| | | | transcription | and may be used or routinely modified to assess the ability of polypeptides of the invention (including |
| | | | through CD28 | antibodies and agonists or antagonists of the invention) to stimulate IL-2 expression in T cells. |
| | | | response | Exemplary assays for transcription through the CD28 response element that may be used or routinely |
| | | | element in | modified to test CD28-response element activity of polypeptides of the invention (including antibodies |
| | | | immune cells | and agonists or antagonists of the invention) include assays disclosed in Berger et al., Gene 66: 1-10 |
| | | | (such as T-cells). | (1988); Cullen and Malm, Methods in Enzymol 216: 362-368 (1992); Henthorn et al., Proc Natl Acad Sci |
| | | | | USA 85: 6342-6346 (1988); McGuire and Iacobelli, J Immunol 159(3): 1319-1327 (1997); Parra et al., J |
| | | | | Immunol 166(4): 2437-2443 (2001); and Butscher et al., J Biol Chem 3(1): 552-560 (1998), the contents |
| | | | | of each of which are herein incorporated by reference in its entirety. T cells that may be used according |
| | | | | to these assays are publicly available (e.g., through the ATCC). Exemplary human T cells that may be |
| | | | | used according to these assays include the JURKAT cell line, which is a suspension culture of leukemia |
| | | | | cells that produce IL-2 when stimulated. |
| 3 | HACBD91 | 302 | Activation of | Assays for the activation of transcription through the AP1 response element are well-known in the art and |
| | | | transcription | may be used or routinely modified to assess the ability of polypeptides of the invention (including |
| | | | through AP1 | antibodies and agonists or antagonists of the invention) to modulate growth and other cell functions. |
| | | | response | Exemplary assays for transcription through the AP1 response element that may be used or routinely |
| | | | element in | modified to test AP1-response element activity of polypeptides of the invention (including antibodies and |
| | | | immune cells | agonists or antagonists of the invention) include assays disclosed in Berger et al., Gene 66: 1-10 (1988); |
| | | | (such as T-cells). | Cullen and Malm, Methods in Enzymol 216: 362-368 (1992); Henthorn et al., Proc Natl Acad Sci USA |
| | | | | 85: 6342-6346 (1988); Rellahan et al., J Biol Chem 272(49): 30806-30811(1997); Chang et al., Mol Cell |
| | | | | Biol 18(9): 4986-4993 (1998); and Fraser et al., Eur J Immunol 29(3): 838-844 (1999), the contents of |
| | | | | each of which are herein incorporated by reference in its entirety. Human T cells that may be used |
| | | | | according to these assays are publicly available (e.g., through the ATCC). Exemplary human T cells that |
| | | | | may be used according to these assays include the SUPT cell line, which is an IL-2 and IL-4 responsive |
| | | | | suspension-culture cell line. |
| 3 | HACBD91 | 302 | Activation of | Assays for the activation of transcription through the CD28 response element are well-known in the art |
| | | | transcription | and may be used or routinely modified to assess the ability of polypeptides of the invention (including |
| | | | through CD28 | antibodies and agonists or antagonists of the invention) to stimulate IL-2 expression in T cells. |
| | | | response | Exemplary assays for transcription through the CD28 response element that may be used or routinely |
| | | | element in | modified to test CD28-response element activity of polypeptides of the invention (including antibodies |
| | | | immune cells | and agonists or antagonists of the invention) include assays disclosed in Berger et al., Gene 66: 1-10 |
| | | | (such as T-cells). | (1988); Cullen and Malm, Methods in Enzymol 216: 362-368 (1992); Henthorn et al., Proc Natl Acad Sci |
| | | | | USA 85: 6342-6346 (1988); McGuire and Iacobelli, J Immunol 159(3): 1319-1327 (1997); Parra et al., J |
| | | | | Immunol 166(4): 2437-2443 (2001); and Butscher et al., J Biol Chem 3(1): 552-560 (1998), the contents |
| | | | | of each of which are herein incorporated by reference in its entirety. T cells that may be used according |
| | | | | to these assays are publicly available (e.g., through the ATCC). Exemplary human T cells that may be |
| | | | | used according to these assays include the SUPT cell line, which is a suspension culture of IL-2 and IL-4 |
| | | | | responsive T cells. |
| 3 | HACBD91 | 302 | Activation of | Assays for the activation of transcription through the Nuclear Factor of Activated T cells (NFAT) |
| | | | transcription | response element are well-known in the art and may be used or routinely modified to assess the ability of |
| | | | through NFAT | polypeptides of the invention (including antibodies and agonists or antagonists of the invention) to |
| | | | response | regulate NFAT transcription factors and modulate expression of genes involved in immunomodulatory |
| | | | element in | functions. Exemplary assays for transcription through the NFAT response element that may be used or |
| | | | immune cells | routinely modified to test NFAT-response element activity of polypeptides of the invention (including |
| | | | (such as T-cells). | antibodies and agonists or antagonists of the invention) include assays disclosed in Berger et al., Gene |
| | | | | 66: 1-10 (1998); Cullen and Malm, Methods in Enzymol 216: 362-368 (1992); Henthorn et al., Proc Natl |
| | | | | Acad Sci USA 85: 6342-6346(1988); Serfling et al., Biochim Biophys Acta 1498(1): 1-18 (2000); De |
| | | | | Boer et al., Int J Biochem Cell Biol 31(10): 1221-1236 (1999); Fraser et al., Eur J Immunol 29(3): 838-844 |
| | | | | (1999); and Yeseen et al., J Biol Chem 268(19): 14285-14293 (1993), the contents of each of which are |
| | | | | herein incorporated by reference in its entirety. T cells that may be used according to these assays are |
| | | | | publicly available (e.g., through the ATCC). Exemplary human T cells that may be used according to |
| | | | | these assays include the SUPT cell line, which is a suspension culture of IL-2 and IL-4 responsive T |
| | | | | cells. |
| 3 | HACBD91 | 302 | Activation of | Assays for the activation of transcription through the Signal Transducers and Activators of Transcription |
| | | | transcription | (STAT6) response element are well-known in the art and may be used or routinely modified to assess the |
| | | | through STAT6 | ability of polypeptides of the invention (including antibodies and agonists or antagonists of the invention) |
| | | | response | to regulate STAT6 transcription factors and modulate the expression of multiple genes. Exemplary |
| | | | element in | assays for transcription through the STAT6 response element that may be used or routinely modified to |
| | | | immune cells | test STAT6 response element activity of the polypeptides of the invention (including antibodies and |
| | | | (such as T- | agonists or antagonists of the invention) include assays disclosed in Berger et al., Gene 66: 1-10 (1998); |
| | | | cells). | Cullen and Malm, Methods in Enzymol 216: 362-368 (1992); Henthorn et al., Proc Natl Acad Sci USA |
| | | | | 85: 6342-6346 (1988); Georas et al., Blood 92(12): 4529-4538 (1998); Moffatt et al., Transplantation |
| | | | | 69(7): 1521-1523 (2000); Curiel et al., Eur J Immunol 27(8): 1982-1987 (1997); and Masuda et al., J Biol |
| | | | | Chem 275(38): 29331-29337 (2000), the contents of each of which are herein incorporated by reference in |
| | | | | its entirety. T cells that may be used according to these assays are publicly available (e.g., through the |
| | | | | ATCC). Exemplary T cells that may be used according to these assays include the SUPT cell line, which |
| | | | | is a suspension culture of IL-2 and IL-4 responsive T cells. |
| 3 | HACBD91 | 302 | Activation of | Assays for the activation of transcription through the NFKB response element are well-known in the art |
| | | | transcription | and may be used or routinely modified to assess the ability of polypeptides of the invention (including |
| | | | through NFKB | antibodies and agonists or antagonists of the invention) to regulate NFKB transcription factors and |
| | | | response | modulate expression of immunomodulatory genes. Exemplary assays for transcription through the |
| | | | element in | NFKB response element that may be used or rountinely modified to test NFKB-response element activity |
| | | | immune cells | of polypeptides of the invention (including antibodies and agonists or antagonists of the invention) |
| | | | (such as T- | include assays disclosed in Berger et al., Gene 66: 1-10 (1998); Cullen and Malm, Methods in Enzymol |
| | | | cells). | 216: 362-368 (1992); Henthorn et al., Proc Natl Acad Sci USA 85: 6342-6346 (1988); Black et al., Virus |
| | | | | Gnes 15(2): 105-117 (1997); and Fraser et al., 29(3): 838-844 (1999), the contents of each of which are |
| | | | | herein incorporated by reference in its entirety. T cells that may be used according to these assays are |
| | | | | publicly available (e.g., through the ATCC). Exemplary human T cells that may be used according to |
| | | | | these assays include the SUPT cell line, which is a suspension culture of IL-2 and IL-4 responsive T |
| | | | | cells. |
| 3 | HACBD91 | 302 | Activation of | Assays for the activation of transcription through the Nuclear Factor of Activated T cells (NFAT) |
| | | | transcription | response element are well-known in the art and may be used or routinely modified to assess the ability of |
| | | | through NFAT | polypeptides of the invention (including antibodies and agonists or antagonists of the invention) to |
| | | | response | regulate NFAT transcription factors and modulate expression of genes involved in immunomodulatory |
| | | | element in | functions. Exemplary assays for transcription through the NFAT response element that may be used or |
| | | | immune cells | routinely modified to test NFAT-response element activity of polypeptides of the invention (including |
| | | | (such as natural | antibodies and agonists or antagonists of the invention) include assays disclosed in Berger et al., Gene |
| | | | killer cells). | 66: 1-10 (1998); Cullen and Malm, Methods in Enzymol 216: 362-368 (1992); Henthorn et al., Proc Natl |
| | | | | Acad Sci USA 85: 6342-6346 (1988); Aramburu et al., J Exp Med 182(3): 801-810 (1995); De Boer et al., |
| | | | | Int J Biochem Cell Biol 31(10): 1221-1236 (1999); Fraser et al., Eur J Immunol 29(3): 838-844 (1999); |
| | | | | and Yeseen et al., J Biol Chem 268(19): 14285-14293 (1993), the contents of each of which are herein |
| | | | | incorporated by reference in its entirety. NK cells that may be used according to these assays are |
| | | | | publicly available (e.g., through the ATCC). Exemplary human NK cells that may be used according to |
| | | | | these assays include the NK-YT cell line, which is a human natural killer cell line with cytolytic and |
| | | | | cytotoxic activity. |
| 3 | HACBD91 | 302 | Activation of | Assays for the activation of transcription through the Serum Response Element (SRE) are well-known in |
| | | | transcription | the art and may be used or routinely modified to assess the ability of polypeptides of the invention |
| | | | through serum | (including antibodies and agonists or antagonists of the invention) to regulate serum response factors and |
| | | | response | modulate the expression of genes involved in growth and upregulate the function of growth-related genes |
| | | | element in | in many cell types. Exemplary assays for transcription through the SRE that may be used or routinely |
| | | | immune cells | modified to test SRE activity of the polypeptides of the invention (including antibodies and agonists or |
| | | | (such as natural | antagonists of the invention) include assays disclosed in Berger et al., Gene 66: 1-10 (1998); Cullen and |
| | | | killer cells). | Malm, Methods in Enzymol 216: 362-368 (1992); Henthorn et al., Proc Natl Acad Sci USA 85: 6342-6346 |
| | | | | (1988); Benson et al., J Immunol 153(9): 3862-3873 (1994); and Black et al., Virus Genes 12(2): 105-117 |
| | | | | (1997), the content of each of which are herein incorporated by reference in its entirety. T cells that may |
| | | | | be used according to these assays are publicly available (e.g., through the ATCC). Exemplary T cells |
| | | | | that may be used according to these assays include the NK-YT cell line, which is a human natural killer |
| | | | | cell line with cytolytic and cytotoxic activity. |
| 4 | HAGAQ26 | 303 | Stimulation of | Assays for measuring secretion of insulin are well-known in the art and may be used or routinely |
| | | | insulin secretion | modified to assess the ability of polypeptides of the invention (including antibodies and agonists or |
| | | | from pancreatic | antagonists of the invention) to stimulate insulin secretion. For example, insulin secretion is measured by |
| | | | beta cells. | FMAT using anti-rat insulin antibodies. Insulin secretion from pancreatic beta cells is upregulated by |
| | | | | glucose and also by certain proteins/peptides, and disregulation is a key component in diabetes. |
| | | | | Exemplary assays that may be used or routinely modified to test for stimulation of insulin secretion (from |
| | | | | pancreatic cells) by polypeptides of the invention (including antibodies and agonists or antagonists of the |
| | | | | invention) include assays disclosed in: Ahren, B., et al., Am J Physiol, 277(4 Pt 2): R959-66 (1999) Li, M., |
| | | | | et al., Endocrinology, 138(9): 3735-40 (1997); Kim, K. H., et al., FEBS Lett, 377(2): 237-9 (1995); |
| | | | | and, Miraglia S et. al., Journal of Biomolecular Screening, 4: 193-204 (1999), the contents of each of |
| | | | | which is herein incorporated by reference in its entirety. Pancreatic cells that may be used according to |
| | | | | these assays are publicly available (e.g., through the ATCC) and/or may be routinely generated. |
| | | | | Exemplary pancreatic cells that may be used according to these assays include rat INS-1 cells. INS-1 |
| | | | | cells are a semi-adherent cell line established from cells isolated from an X-ray induced rat transplantable |
| | | | | insulinoma. These cells retain characteristics typical of native pancreatic beta cells including glucose |
| | | | | inducible insulin secretion. References: Asfari et al., Endocrinology 1992 130: 167. |
| 5 | HAGDS35 | 304 | Regulation of | Assays for the regulation of transcription through the DMEF1 response element are well-known in the art |
| | | | transcription via | and may be used or routinely modified to assess the ability of polypeptides of the invention (including |
| | | | DMEF1 | antibodies and agonists or antagonists of the invention) to activate the DMEF1 response element in a |
| | | | response | reporter construct (such as that containing the GLUT4 promoter) and to regulate insulin production. The |
| | | | element in | DMEF1 response element is present in the GLUT4 promoter and binds to MEF2 transcription factor and |
| | | | adipocytes and | another transcription factor that is required for insulin regulation of Glut4 expression in skeletal muscle. |
| | | | pre-adipocytes | GLUT4 is the primary insulin-responsive glucose transporter in fat and muscle tissue. Exemplary assays |
| | | | | that may be used or routinely modified to test for DMEF1 response element activity (in adipocytes and |
| | | | | pre-adipocytes) by polypeptides of the invention (including antibodies and agonists or antagonists of the |
| | | | | invention) include assays disclosed inThai, M. V., et al., J Biol Chem, 273(23): 14285-92 (1998); Mora, S., |
| | | | | et al., J Biol Chem, 275(21): 16323-8 (2000); Liu, M. L., et al., J Biol Chem, 269(45): 28514-21 (1994); |
| | | | | “Identification of a 30-base pair regulatory element and novel DNA binding protein that regulates the |
| | | | | human GLUT4 promoter in transgenic mice”, J Biol Chem. 2000 Aug 4; 275(31): 23666-73; Berger, et al., |
| | | | | Gene 66: 1-10 (1988); and, Cullen, B., et al., Methods in Enzymol. 216: 362-368 (1992), the contents of |
| | | | | each of which is herein incorporated by reference in its entirety. Adipocytes and pre-adipocytes that may |
| | | | | be used according to these assays are publicly available (e.g., through the ATCC) and/or may be |
| | | | | routinely generated. Exemplary cells that may be used according to these assays include the mouse 3T3- |
| | | | | L1 cell line which is an adherent mouse preadipocyte cell line. Mouse 3T3-L1 cells are a continuous |
| | | | | substrain of 3T3 fibroblasts developed through clonal isolation. These cells undergo a pre-adipocyte to |
| | | | | adipose-like conversion under appropriate differentiation culture conditions. |
| 6 | HAJAN23 | 305 | Stimulation of | Assays for measuring calcium flux are well-known in the art and may be used or routinely modified to |
| | | | Calcium Flux in | assess the ability of polypeptides of the invention (including antibodies and agonists or antagonists of the |
| | | | pancreatic beta | invention) to mobilize calcium. For example, the FLPR assay may be used to measure influx of calcium. |
| | | | cells. | Cells normally have very low concentrations of cytosolic calcium compared to much higher extracellular |
| | | | | calcium. Extracellular factors can cause an influx of calcium, leading to activation of calcium responsive |
| | | | | signaling pathways and alterations in cell functions. Exemplary assays that may be used or routinely |
| | | | | modified to measure calcium flux by polypeptides of the invention (including antibodies and agonists or |
| | | | | antagonists of the invention) include assays disclosed in: Satin LS, et al., Endocrinology, 136(10): 4589-601 |
| | | | | (1995); Mogami H, et al., Endocrinology, 136(7): 2960-6 (1995); Richardson SB, et al., Biochem J, |
| | | | | 288 (Pt 3): 847-51 (1992); and, Meats, JE, et al., Cell Calcium 1989 Nov-Dec; 10(8): 535-41 (1989), the |
| | | | | contents of each of which is herein incorporated by reference in its entirety. Pancreatic cells that may be |
| | | | | used according to these assays are publicly available (e.g., through the ATCC) and/or may be routinely |
| | | | | generated. Exemplary pancreatic cells that may be used according to these assays include HITT15 Cells. |
| | | | | HITT15 are an adherent epithelial cell line established from Syrian hamster islet cells transformed with |
| | | | | SV40. These cells express glucagon, somatostatin, and glucocorticoid receptors. The cells secrete |
| | | | | insulin, which is stimulated by glucose and glucagon and suppressed by somatostatin or glucocorticoids. |
| | | | | ATTC# CRL-1777 Refs: Lord and Ashcroft. Biochem. J. 219: 547-551; Santerre et al. Proc. Natl. |
| | | | | Acad. Sci. USA 78: 4339-4343, 1981. |
| 7 | HAJBR69 | 306 | Regulation of | Assays for the regulation of transcription through the PEPCK promoter are well-known in the art and |
| | | | transcription | may be used or routinely modified to assess the ability of polypeptides of the invention (including |
| | | | through the | antibodies and agonists or antagonists of the invention) to activate the PEPCK promoter in a reporter |
| | | | PEPCK | construct and regulate liver gluconeogenesis. Exemplary assays for regulation of transcription through |
| | | | promoter in | the PEPCK promoter that may be used or routinely modified to test for PEPCK promoter activity (in |
| | | | hepatocytes | hepatocytes) of polypeptides of the invention (including antibodies and agonists or antagonists of the |
| | | | | invention) include assays disclosed in Berger et al., Gene 66: 1-10 (1998); Cullen and Malm, Methods in |
| | | | | Enzymol 216: 362-368 (1992); Henthorn et al., Proc Natl Acad Sci USA 85: 6342-6346 (1988); Lochhead |
| | | | | et al., Diabetes 49(6): 896-903 (2000); and Yeagley et al., J Biol Chem 275(23): 17814-17820 (2000), the |
| | | | | contents of each of which is herein incorporated by reference in its entirety. Hepatocyte cells that may be |
| | | | | used according to these assays are publicly available (e.g., through the ATCC) and/or may be routinely |
| | | | | generated. Exemplary liver hepatoma cells that may be used according to these assays include H4lle |
| | | | | cells, which contain a tyrosine amino transferase that is inducible with glucocorticoids, insulin, or cAMP |
| | | | | derivatives. |
| 7 | HAJBR69 | 306 | Production of | GM-CSF FMAT. GM-CSF is expressed by activated T cells, macrophages, endothelial cells, and |
| | | | GM-CSF | fibroblasts. GM-CSF regulates differentiation and proliferation of granulocytes-macrophage progenitors |
| | | | | and enhances antimicrobial activity in neutrophils, monocytes and macrophage. Additionally, GM-CSF |
| | | | | plays an important role in the differentiation of dendritic cells and monocytes, and increases antigen |
| | | | | presentation. GM-CSF is considered to be a proinflammatory cytokine. Assays for immunomodulatory |
| | | | | proteins that promote the production of GM-CSF are well known in the art and may be used or routinely |
| | | | | modified to assess the ability of polypeptides of the invention (including antibodies and agonists or |
| | | | | antagonists of the invention) to mediate immunomodulation and modulate the growth and differentiation |
| | | | | of leukocytes. Exemplary assays that test for immunomodulatory proteins evaluate the production of |
| | | | | cytokines, such as GM-CSF, and the activation of T cells. Such assays that may be used or routinely |
| | | | | modified to test immunomodulatory activity of polypeptides of the invention (including antibodies and |
| | | | | agonists or antagonists of the invention) include the assays disclosed in Miraglia et al., J Biomolecular |
| | | | | Screening 4: 193-204 (1999); Rowland et al., “Lymphocytes: a practical approach” Chapter 6: 138-160 |
| | | | | (2000); and Ye et al., J Leukoc Biol (58(2): 225-233, the contents of each of which are herein |
| | | | | incorporated by reference in its entirety. Natural killer cells that may be used according to these assays |
| | | | | are publicly available (e.g., through the ATCC) or may be isolated using techniques disclosed herein or |
| | | | | otherwise known in the art. Natural killer (NK) cells are large granular lymphocytes that have cytotoxic |
| | | | | activity but do bind antigen. NK cells show antibody-independent killing of tumor cells and also |
| | | | | recognize antibody bound on target cells, via NK Fc receptors, leading to cell-mediated cytotoxicity. |
| 8 | HAMFE15 | 307 | Regulation of | Assays for the regulation of transcription through the DMEF1 response element are well-known in the art |
| | | | transcription via | and may be used or routinely modified to assess the ability of polypeptides of the invention (including |
| | | | DMEF1 | antibodies and agonists or antagonists of the invention) to activate the DMEF1 response element in a |
| | | | response | reporter construct (such as that containing the GLUT4 promoter) and to regulate insulin production. The |
| | | | element in | DMEF1 response element is present in the GLUT4 promoter and binds to MEF2 transcription factor and |
| | | | adipocytes and | another transcription factor that is required for insulin regulation of Glut4 expression in skeletal muscle. |
| | | | pre-adipocytes | GLUT4 is the primary insulin-responsive glucose transporter in fat and muscle tissue. Exemplary assays |
| | | | | that may be used or routinely modified to test for DMEF1 response element activity (in adipocytes and |
| | | | | pre-adipocytes) by polypeptides of the invention (including antibodies and agonists or antagonists of the |
| | | | | invention) include assays disclosed inThai, M. V., et al., J Biol Chem, 273(23): 14285-92 (1998); Mora, S., |
| | | | | et al., J Biol Chem, 275(21): 16323-8 (2000); Liu, M. L., et al., J Biol Chem, 269(45): 28514-21 (1994); |
| | | | | “Identification of a 30-base pair regulatory element and novel DNA binding protein that regulates the |
| | | | | human GLUT4 promoter in transgenic mice”, J Biol Chem. 2000 Aug 4; 275(31): 23666-73; Berger, et al., |
| | | | | Gene 66: 1-10 (1988); and, Cullen, B., et al., Methods in Enzymol. 216: 362-368 (1992), the contents of |
| | | | | each of which is herein incorporated by reference in its entirety. Adipocytes and pre-adipocytes that may |
| | | | | be used according to these assays are publicly available (e.g., through the ATCC) and/or may be |
| | | | | routinely generated. Exemplary cells that may be used according to these assays include the mouse 3T3- |
| | | | | L1 cell line which is an adherent mouse preadipocyte cell line. Mouse 3T3-L1 cells are a continuous |
| | | | | substrain of 3T3 fibroblasts developed through clonal isolation. These cells undergo a pre-adipocyte to |
| | | | | adipose-like conversion under appropriate differentiation culture conditions. |
| 9 | HAMGR28 | 308 | Stimulation of | Assays for measuring calcium flux are well-known in the art and may be used or routinely modified to |
| | | | Calcium Flux in | assess the ability of polypeptides of the invention (including antibodies and agonists or antagonists of the |
| | | | pancreatic beta | invention) to mobilize calcium. For example, the FLPR assay may be used to measure influx of calcium. |
| | | | cells. | Cells normally have very low concentrations of cytosolic calcium compared to much higher extracellular |
| | | | | calcium. Extracellular factors can cause an influx of calcium, leading to activation of calcium responsive |
| | | | | signaling pathways and alterations in cell functions. Exemplary assays that may be used or routinely |
| | | | | modified to measure calcium flux by polypeptides of the invention (including antibodies and agonists or |
| | | | | antagonists of the invention) include assays disclosed in: Satin LS, et al., Endocrinology, 136(10): 4589-601 |
| | | | | (1995); Mogami H, et al., Endocrinology, 136(7): 2960-6 (1995); Richardson SB, et al., Biochem J, |
| | | | | 288 (Pt 3): 847-51 (1992); and, Meats, JE, et al., Cell Calcium 1989 Nov-Dec; 10(8): 535-41 (1989), the |
| | | | | contents of each of which is herein incorporated by reference in its entirety. Pancreatic cells that may be |
| | | | | used according to these assays are publicly available (e.g., through the ATCC) and/or may be routinely |
| | | | | generated. Exemplary pancreatic cells that may be used according to these assays include HITT15 Cells. |
| | | | | HITT15 are an adherent epithelial cell line established from Syrian hamster islet cells transformed with |
| | | | | SV40. These cells express glucagon, somatostatin, and glucocorticoid receptors. The cells secrete |
| | | | | insulin, which is stimulated by glucose and glucagon and suppressed by somatostatin or glucocorticoids. |
| | | | | ATTC# CRL-1777 Refs: Lord and Ashcroft. Biochem. J. 219: 547-551; Santerre et al. Proc. Natl. |
| | | | | Acad. Sci. USA 78: 4339-4343, 1981. |
| 10 | HAPOM49 | 309 | Regulation of | Assays for the regulation of viability and proliferation of cells in vitro are well-known in the art and may |
| | | | viability and | be used or routinely modified to assess the ability of polypeptides of the invention (including antibodies |
| | | | proliferation of | and agonists or antagonists of the invention) to regulate viability and proliferation of pancreatic beta |
| | | | pancreatic beta | cells. For example, the Cell Titer-Glo luminescent cell viability assay measures the number of viable |
| | | | cells. | cells in culture based on quantitation of the ATP present which signals the presence of metabolically |
| | | | | active cells. Exemplary assays that may be used or routinely modified to test regulation of viability and |
| | | | | proliferation of pancreatic beta cells by polypeptides of the invention (including antibodies and agonists |
| | | | | or antagonists of the invention) include assays disclosed in: Friedrichsen BN, et al., Mol Endocrinol, |
| | | | | 15(1): 136-48 (2001); Huotari MA, et al., Endocrinology, 139(4): 1494-9 (1998); Hugl SR, et al., J Biol |
| | | | | Chem 1998 Jul 10; 273(28): 17771-9 (1998), the contents of each of which is herein incorporated by |
| | | | | reference in its entirety. Pancreatic cells that may be used according to these assays are publicly |
| | | | | available (e.g., through the ATCC) and/or may be routinely generated. Exemplary pancreatic cells that |
| | | | | may be used according to these assays include rat INS-1 cells. INS-1 cells are a semi-adherent cell line |
| | | | | established from cells isolated from an X-ray induced rat transplantable insulinoma. These cells retain |
| | | | | characteristics typical of native pancreatic beta cells including glucose inducible insulin secretion. |
| | | | | References: Asfari et al. Endocrinology 1992 130: 167. |
| 11 | HATBR65 | 310 | Production of | IL-6 FMAT. IL-6 is produced by T cells and has strong effects on B cells. IL-6 participates in IL-4 |
| | | | IL-6 | induced IgE production and increases IgA production (IgA plays a role in mucosal immunity). IL-6 |
| | | | | induces cytotoxic T cells. Deregulated expression of IL-6 has been linked to autoimmune disease, |
| | | | | plasmacytomas, myelomas, and chronic hyperproliferative diseases. Assays for immunomodulatory and |
| | | | | differentiation factor proteins produced by a large variety of cells where the expression level is strongly |
| | | | | regulated by cytokines, growth factors, and hormones are well known in the art and may be used or |
| | | | | routinely modified to assess the ability of polypeptides of the invention (including antibodies and |
| | | | | agonists or antagonists of the invention) to mediate immunomodulation and differentiation and modulate |
| | | | | T cell proliferation and function. Exemplary assays that test for immunomodulatory proteins evaluate the |
| | | | | production of cytokines, such as IL-6, and the stimulation and upregulation of T cell proliferation and |
| | | | | functional activities. Such assays that may be used or routinely modified to test immunomodulatory and |
| | | | | differentiation activity of polypeptides of the invention (including antibodies and agonists or antagonists |
| | | | | of the invention) include assays disclosed in Miraglia et al., J Biomolecular Screening 4: 193-204(1999); |
| | | | | Rowland et al., “Lymphocytes: a practical approach” Chapter 6: 138-160 (2000); and Verhasselt et al., J |
| | | | | Immunol 158: 2919-2925 (1997), the contents of each of which are herein incorporated by reference in its |
| | | | | entirety. Human dendritic cells that may be used according to these assays may be isolated using |
| | | | | techniques disclosed herein or otherwise known in the art. Human dendritic cells are antigen presenting |
| | | | | cells in suspension culture, which, when activated by antigen and/or cytokines, initiate and upregulate T |
| | | | | cell proliferation and functional activities. |
| 11 | HATBR65 | 310 | Regulation of | Assays for the regulation of transcription of Malic Enzyme are well-known in the art and may be used or |
| | | | transcription of | routinely modified to assess the ability of polypeptides of the invention (including antibodies and |
| | | | Malic Enzyme | agonists or antagonists of the invention) to regulate transcription of Malic Enzyme, a key enzyme in |
| | | | in adipocytes | lipogenesis. Malic enzyme is involved in lipogenesisand its expression is stimulted by insulin. ME |
| | | | | promoter contains two direct repeat (DR1)-like elements MEp and MEd identified as putative PPAR |
| | | | | response elements. ME promoter may also responds to AP1 and other transcription factors. Exemplary |
| | | | | assays that may be used or routinely modified to test for regulation of transcription of Malic Enzyme (in |
| | | | | adipoocytes) by polypeptides of the invention (including antibodies and agonists or antagonists of the |
| | | | | invention) include assays disclosed in: Streeper, R. S., et al., Mol Endocrinol, 12(11): 1778-91 (1998); |
| | | | | Garcia-Jimenez, C., et al., Mol Endocrinol, 8(10): 1361-9 (1994); Barroso, I., et al., J Biol Chem, |
| | | | | 274(25): 17997-8004 (1999); Ijpenberg, A., et al., J Biol Chem, 272(32): 20108-20117 (1997); Berger, et |
| | | | | al., Gene 66: 1-10 (1988); and, Cullen, B., et al., Methods in Enzymol. 216: 362-368 (1992), the contents |
| | | | | of each of which is herein incorporated by reference in its entirety. Hepatocytes that may be used |
| | | | | according to these assays are publicly available (e.g., through the ATCC) and/or may be routinely |
| | | | | generated. Exemplary hepatocytes that may be used according to these assays includes the H4IIE rat |
| | | | | liver hepatoma cell line. |
| 12 | HAUAI83 | 311 | Insulin | Assays for measuring secretion of insulin are well-known in the art and may be used or routinely |
| | | | Secretion | modified to assess the ability of polypeptides of the invention (including antibodies and agonists or |
| | | | | antagonists of the invention) to stimulate insulin secretion. For example, insulin secretion is measured by |
| | | | | FMAT using anti-rat insulin antibodies. Insulin secretion from pancreatic beta cells is upregulated by |
| | | | | glucose and also by certain proteins/peptides, and disregulation is a key component in diabetes. |
| | | | | Exemplary assays that may be used or routinely modified to test for stimulation of insulin secretion (from |
| | | | | pancreatic cells) by polypeptides of the invention (including antibodies and agonists or antagonists of the |
| | | | | invention) include assays disclosed in: Shimizu, H., et al., Endocr J, 47(3): 261-9 (2000); Salapatek, A. M., |
| | | | | et al., Mol Endocrinol, 13(8): 1305-17 (1999); Filipsson, K., et al., Ann N Y Acad Sci, 865: 441-4 |
| | | | | (1998); Olson, L. K., et al., J Biol Chem, 271(28): 16544-52 (1996); and, Miraglia S et. al., Journal of |
| | | | | Biomolecular Screening, 4: 193-204 (1999), the contents of each of which is herein incorporated by |
| | | | | reference in its entirety. Pancreatic cells that may be used according to these assays are publicly |
| | | | | available (e.g., through the ATCC) and/or may be routinely generated. Exemplary pancreatic cells that |
| | | | | may be used according to these assays include HITT15 Cells. HITT15 are an adherent epithelial cell line |
| | | | | established from Syrian hamster islet cells transformed with SV40. These cells express glucagon, |
| | | | | somatostatin, and glucocorticoid receptors. The cells secrete insulin, which is stimulated by glucose and |
| | | | | glucagon and suppressed by somatostatin or glucocorticoids. ATTC# CRL-1777 Refs: Lord and |
| | | | | Ashcroft. Biochem. J. 219: 547-551; Santerre et al. Proc. Natl. Acad. Sci. USA 78: 4339-4343,1981. |
| 13 | HBAMB15 | 312 | Stimulation of | Assays for measuring secretion of insulin are well-known in the art and may be used or routinely |
| | | | insulin secretion | modified to assess the ability of polypeptides of the invention (including antibodies and agonists or |
| | | | from pancreatic | antagonists of the invention) to stimulate insulin secretion. For example, insulin secretion is measured by |
| | | | beta cells. | FMAT using anti-rat insulin antibodies. Insulin secretion from pancreatic beta cells is upregulated by |
| | | | | glucose and also by certain proteins/peptides, and disregulation is a key component in diabetes. |
| | | | | Exemplary assays that may be used or routinely modified to test for stimulation of insulin secretion (from |
| | | | | pancreatic cells) by polypeptides of the invention (including antibodies and agonists or antagonists of the |
| | | | | invention) include assays disclosed in: Ahren, B., et al., Am J Physiol, 277(4 Pt 2): R959-66 (1999); Li, M., |
| | | | | et al., Endocrinology, 138(9): 3735-40 (1997); Kim, K. H., et al., FEBS Lett, 377(2): 237-9 (1995); |
| | | | | and, Miraglia S et. al., Journal of Biomolecular Screening, 4: 193-204 (1999), the contents of each of |
| | | | | which is herein incorporated by reference in its entirety. Pancreatic cells that may be used according to |
| | | | | these assays are publicly available (e.g., through the ATCC) and/or may be routinely generated. |
| | | | | Exemplary pancreatic cells that may be used according to these assays include rat INS-1 cells. INS-1 |
| | | | | cells are a semi-adherent cell line established from cells isolated from an X-ray induced rat transplantable |
| | | | | insulinoma. These cells retain characteristics typical of native pancreatic beta cells including glucose |
| | | | | inducible insulin secretion. References: Asfari et al. Endocrinology 1992 130: 167. |
| 14 | HBGBA69 | 313 | Regulation of | Assays for the regulation of viability and proliferation of cells in vitro are well-known in the art and may |
| | | | viability and | be used or routinely modified to assess the ability of polypeptides of the invention (including antibodies |
| | | | proliferation of | and agonists or antagonists of the invention) to regulate viability and proliferation of pancreatic beta |
| | | | pancreatic beta | cells. For example, the Cell Titer-Glo luminescent cell viability assay measures the number of viable |
| | | | cells. | cells in culture based on quantitation of the ATP present which signals the presence of metabolically |
| | | | | active cells. Exemplary assays that may be used or routinely modified to test regulation of viability and |
| | | | | proliferation of pancreatic beta cells by polypeptides of the invention (including antibodies and agonists |
| | | | | or antagonists of the invention) include assays disclosed in: Friedrichsen BN, et al., Mol Endocrinol, |
| | | | | 15(1): 136-48 (2001); Huotari MA, et al., Endocrinology, 139(4): 1494-9 (1998); Hugl SR, et al., J Biol |
| | | | | Chem 1998 Jul 10; 273(28): 17771-9 (1998), the contents of each of which is herein incorporated by |
| | | | | reference in its entirety. Pancreatic cells that may be used according to these assays are publicly |
| | | | | available (e.g., through the ATCC) and/or may be routinely generated. Exemplary pancreatic cells that |
| | | | | may be used according to these assays include rat INS-1 cells. INS-1 cells are a semi-adherent cell line |
| | | | | established from cells isolated from an X-ray induced rat transplantable insulinoma. These cells retain |
| | | | | characteristics typical of native pancreatic beta cells including glucose inducible insulin secretion. |
| | | | | References: Asfari et al. Endocrinology 1992 130: 167. |
| 15 | HBIAE26 | 314 | Insulin | Assays for measuring secretion of insulin are well-known in the art and may be used or routinely |
| | | | Secretion | modified to assess the ability of polypeptides of the invention (including antibodies and agonists or |
| | | | | antagonists of the invention) to stimulate insulin secretion. For example, insulin secretion is measured by |
| | | | | FMAT using anti-rat insulin antibodies. Insulin secretion from pancreatic beta cells is upregulated by |
| | | | | glucose and also by certain proteins/peptides, and disregulation is a key component in diabetes. |
| | | | | Exemplary assays that may be used or routinely modified to test for stimulation of insulin secretion (from |
| | | | | pancreatic cells) by polypeptides of the invention (including antibodies and agonists or antagonists of the |
| | | | | invention) include assays disclosed in: Shimizu, H., et al., Endocr J, 47(3): 261-9 (2000); Salapatek, A. M., |
| | | | | et al., Mol Endocrinol, 13(8): 1305-17 (1999); Filipsson, K., et al., Ann N Y Acad Sci, 865: 441-4 |
| | | | | (1998); Olson, L. K., et al., J Biol Chem, 271(28): 16544-52 (1996); and, Miraglia S et. al., Journal of |
| | | | | Biomolecular Screening, 4: 193-204 (1999), the contents of each of which is herein incorporated by |
| | | | | reference in its entirety. Pancreatic cells that may be used according to these assays are publicly |
| | | | | available (e.g., through the ATCC) and/or may be routinely generated. Exemplary pancreatic cells that |
| | | | | may be used according to these assays include HITT15 Cells. HITT15 are an adherent epithelial cell line |
| | | | | established from Syrian hamster islet cells transformed with SV40. These cells express glucagon, |
| | | | | somatostatin, and glucocorticoid receptors. The cells secrete insulin, which is stimulated by glucose and |
| | | | | glucagon and suppressed by somatostatin or glucocorticoids. ATTC# CRL-1777 Refs: Lord and |
| | | | | Ashcroft. Biochem. J. 219: 547-551; Santerre et al. Proc. Natl. Acad. Sci. USA 78: 4339-4343, 1981. |
| 16 | HBINS58 | 315 | Production of | TNFa FMAT. Assays for immunomodulatory proteins produced by activated macrophages, T cells, |
| | | | TNF alpha by | fibroblasts, smooth muscle, and other cell types that exert a wide variety of inflammatory and cytotoxic |
| | | | dendritic cells | effects on a variety of cells are well known in the art and may be used or routinely modified to assess the |
| | | | | ability of polypeptides of the invention (including antibodies and agonists or antagonists of the invention) |
| | | | | to mediate immunomodulation, modulate inflammation and cytotoxicity. Exemplary assays that test for |
| | | | | immunomodulatory proteins evaluate the production of cytokines such as tumor necrosis factor alpha |
| | | | | (TNFa), and the induction or inhibition of an inflammatory or cytotoxic response. Such assays that may |
| | | | | be used or routinely modified to test immunomodulatory activity of polypeptides of the invention |
| | | | | (including antibodies and agonists or antagonists of the invention) include assays disclosed in Miraglia et |
| | | | | al., J Biomolecular Screening 4: 193-204(1999); Rowland et al., “Lymphocytes: a practical approach” |
| | | | | Chapter 6: 138-160 (2000); Verhasselt et al., Eur J Immunol 28(11): 3886-3890 (1198); Dahlen et al., J |
| | | | | Immunol 160(7): 3585-3593 (1998); Verhasselt et al., J Immunol 158: 2919-2925 (1997); and Nardelli et |
| | | | | al., J Leukoc Biol 65: 822-828 (1999), the contents of each of which are herein incorporated by reference |
| | | | | in its entirety. Human dendritic cells that may be used according to these assays may be isolated using |
| | | | | techniques disclosed herein or otherwise known in the art. Human dendritic cells are antigen presenting |
| | | | | cells in suspension culture, which, when activated by antigen and/or cytokines, initiate and upregulate T |
| | | | | cell proliferation and functional activities. |
| 16 | HBINS58 | 315 | Insulin | Assays for measuring secretion of insulin are well-known in the art and may be used or routinely |
| | | | Secretion | modified to assess the ability of polypeptides of the invention (including antibodies and agonists or |
| | | | | antagonists of the invention) to stimulate insulin secretion. For example, insulin secretion is measured by |
| | | | | FMAT using anti-rat insulin antibodies. Insulin secretion from pancreatic beta cells is upregulated by |
| | | | | glucose and also by certain proteins/peptides, and disregulation is a key component in diabetes. |
| | | | | Exemplary assays that may be used or routinely modified to test for stimulation of insulin secretion (from |
| | | | | pancreatic cells) by polypeptides of the invention (including antibodies and agonists or antagonists of the |
| | | | | invention) include assays disclosed in: Shimizu, H., et al., Endocr J, 47(3): 261-9 (2000); Salapatek, A. M., |
| | | | | et al., Mol Endocrinol, 13(8): 1305-17 (1999); Filipsson, K., et al., Ann N Y Acad Sci, 865: 441-4 |
| | | | | (1998); Olson, L. K., et al., J Biol Chem, 271(28): 16544-52 (1996); and, Miraglia S et. al, Journal of |
| | | | | Biomolecular Screening, 4: 193-204 (1999), the contents of each of which is herein incorporated by |
| | | | | reference in its entirety. Pancreatic cells that may be used according to these assays are publicly |
| | | | | available (e.g., through the ATCC) and/or may be routinely generated. Exemplary pancreatic cells that |
| | | | | may be used according to these assays include HITT15 Cells. HITT15 are an adherent epithelial cell line |
| | | | | established from Syrian hamster islet cells transformed with SV40. These cells express glucagon, |
| | | | | somatostatin, and glucocorticoid receptors. The cells secrete insulin, which is stimulated by glucose and |
| | | | | glucagon and suppressed by somatostatin or glucocorticoids. ATTC# CRL-1777 Refs: Lord and |
| | | | | Ashcroft. Biochem. J. 219: 547-551; Santerre et al. Proc. Natl. Acad. Sci. USA 78: 4339-4343, 1981. |
| 17 | HBNAW17 | 316 | Activation of | Assays for the activation of transcription through the Serum Response Element (SRE) are well-known in |
| | | | transcription | the art and may be used or routinely modified to assess the ability of polypeptides of the invention |
| | | | through serum | (including antibodies and agonists or antagonists of the invention) to regulate the serum response factors |
| | | | response | and modulate the expression of genes involved in growth. Exemplary assays for transcription through |
| | | | element in | the SRE that may be used or routinely modified to test SRE activity of the polypeptides of the invention |
| | | | immune cells | (including antibodies and agonists or antagonists of the invention) include assays disclosed in Berger et |
| | | | (such as T- | al., Gene 66: 1-10 (1998); Cullen and Malm, Methods in Enzymol 216: 362-368 (1992); Henthorn et al., |
| | | | cells). | Proc Natl Acad Sci USA 85: 6342-6346 (1988); and Black et al., Virus Genes 12(2): 105-117 (1997), the |
| | | | | content of each of which are herein incorporated by reference in its entirety. T cells that may be used |
| | | | | according to these assays are publicly available (e.g., through the ATCC). Exemplary mouse T cells that |
| | | | | may be used according to these assays include the CTLL cell line, which is an IL-2 dependent suspension |
| | | | | culture of T cells with cytotoxic activity. |
| 17 | HBNAW17 | 316 | Insulin | Assays for measuring secretion of insulin are well-known in the art and may be used or routinely |
| | | | Secretion | modified to assess the ability of polypeptides of the invention (including antibodies and agonists or |
| | | | | antagonists of the invention) to stimulate insulin secretion. For example, insulin secretion is measured by |
| | | | | FMAT using anti-rat insulin antibodies. Insulin secretion from pancreatic beta cells is upregulated by |
| | | | | glucose and also by certain proteins/peptides, and disregulation is a key component in diabetes. |
| | | | | Exemplary assays that may be used or routinely modified to test for stimulation of insulin secretion (from |
| | | | | pancreatic cells) by polypeptides of the invention (including antibodies and agonists or antagonists of the |
| | | | | invention) include assays disclosed in: Shimizu, H., et al., Endocr J, 47(3): 261-9 (2000); Salapatek, A. M., |
| | | | | et al., Mol Endocrinol, 13(8): 1305-17 (1999); Filipsson, K., et al., Ann N Y Acad Sci, 865: 441-4 |
| | | | | (1998); Olson, L. K., et al., J Biol Chem, 271(28): 16544-52 (1996); and, Miraglia S et. al., Journal of |
| | | | | Biomolecular Screening, 4: 193-204 (1999), the contents of each of which is herein incorporated by |
| | | | | reference in its entirety. Pancreatic cells that may be used according to these assays are publicly |
| | | | | available (e.g., through the ATCC) and/or may be routinely generated. Exemplary pancreatic cells that |
| | | | | may be used according to these assays include HITT15 Cells. HITT15 are an adherent epithelial cell line |
| | | | | established from Syrian hamster islet cells transformed with SV40. These cells express glucagon, |
| | | | | somatostatin, and glucocorticoid receptors. The cells secrete insulin, which is stimulated by glucose and |
| | | | | glucagon and suppressed by somatostatin or glucocorticoids. ATTC# CRL-1777 Refs: Lord and |
| | | | | Ashcroft. Biochem. J. 219: 547-551; Santerre et al. Proc. Natl. Acad. Sci. USA 78: 4339-4343, 1981. |
| 18 | HCE2F54 | 317 | Regulation of | Assays for the regulation of transcription through the PEPCK promoter are well-known in the art and |
| | | | transcription | may be used or routinely modified to assess the ability of polypeptides of the invention (including |
| | | | through the | antibodies and agonists or antagonists of the invention) to activate the PEPCK promoter in a reporter |
| | | | PEPCK | construct and regulate liver gluconeogenesis. Exemplary assays for regulation of transcription through |
| | | | promoter in | the PEPCK promoter that may be used or routinely modified to test for PEPCK promoter activity (in |
| | | | hepatocytes | hepatocytes) of polypeptides of the invention (including antibodies and agonists or antagonists of the |
| | | | | invention) include assays disclosed in Berger et al., Gene 66: 1-10 (1998); Cullen and Malm, Methods in |
| | | | | Enzymol 216: 362-368 (1992); Henthorn et al., Proc Natl Acad Sci USA 85: 6342-6346 (1988); Lochhead |
| | | | | et al., Diabetes 49(6): 896-903 (2000); and Yeagley et al., J Biol Chem 275(23): 17814-17820 (2000), the |
| | | | | contents of each of which is herein incorporated by reference in its entirety. Hepatocyte cells that may be |
| | | | | used according to these assays are publicly available (e.g., through the ATCC) and/or may be routinely |
| | | | | generated. Exemplary liver hepatoma cells that may be used according to these assays include H4lIe |
| | | | | cells, which contain a tyrosine amino transferase that is inducible with glucocorticoids, insulin, or cAMP |
| | | | | derivatives. |
| 18 | HCE2F54 | 317 | Activation of | Assays for the activation of transcription through the NFKB response element are well-known in the art |
| | | | transcription | and may be used or routinely modified to assess the ability of polypeptides of the invention (including |
| | | | through NFKB | antibodies and agonists or antagonists of the invention) to regulate NFKB transcription factors and |
| | | | response | modulate expression of epithhelial genes. Exemplary assays for transcription through the NFKB |
| | | | element in | response element that may be used or routinely modified to test NFKB-response element activity of |
| | | | epithelial cells | polypeptides of the invention (including antibodies and agonists or antagonists of the invention) include |
| | | | (such as HELA | assays disclosed in: Kaltschmidt B, et al., Oncogene, 18(21): 3213-3225 (1999); Beetz A, et al., Int J |
| | | | cells). | Radiat Biol, 76(11): 1443-1453 (2000); Berger et al., Gene 66: 1-10 (1998); Cullen and Malm, Methods in |
| | | | | Enzymol 216: 362-368 (1992); Henthorn et al., Proc Natl Acad Sci USA 85: 6342-6346 (1988); Valle Blazquez |
| | | | | et al, Immunology 90(3): 455-460 (1997); Aramburau et al., J Exp Med 82(3): 801-810 (1995); |
| | | | | and Fraser et al., 29(3): 838-844 (1999), the contents of each of which are herein incorporated by |
| | | | | reference in its entirety. Epithelial cells that may be used according to these assays are publicly available |
| | | | | (e.g., through the ATCC). Exemplary epithelial cells that may be used according to these assays include |
| | | | | the HELA cell line. |
| 18 | HCE2F54 | 317 | Activation of | This assay uses a NFKB response element (which will bind NFKB transcription factors) linked to a |
| | | | transcription | reporter gene to measure NFKB mediated transcription in the human monocyte cell line U937. NFKB is |
| | | | through NFKB | upregulated by cytokines and other factors and NFKB element activation leads to expression of |
| | | | response | immunomodulatory genes. Activation of NFKB in monocytes can play a role in immune responses. |
| | | | element in | Exemplary assays for transcription through the NFKB response element that may be used or rountinely |
| | | | immune cells | modified to test NFKB-response element activity of polypeptides of the invention (including antibodies |
| | | | (such as the | and agonists or antagonists of the invention) include assays disclosed in Berger et al., Gene 66: 1-10 |
| | | | U937 human | (1998); Cullen and Malm, Methods in Enzymol 216: 362-368 (1992); Henthorn et al., Proc Natl Acad Sci |
| | | | monocyte cell | USA 85: 6342-6346 (1988); Valle Blazquez et al., Immunology 90(3): 455-460 (1997); Aramburau et al., J |
| | | | line). | Exp Med 82(3): 801-810 (1995); and Fraser et al., 29(3): 838-844 (1999), the contents of each of which |
| | | | | are herein incorporated by reference in its entirety. Monocytic cells that may be used according to these |
| | | | | assays are publicly available (e.g., through the ATCC). Exemplary human monocyte cells that may be |
| | | | | used according to these assays include the U937 cell line, which is cell line derived by Sundstrom and |
| | | | | Nilsson in 1974 from malignant cells obtained from the pleural effusion of a patient with histiocytic |
| | | | | lymphoma. |
| 19 | HCE3G69 | 318 | Stimulation of | Assays for measuring secretion of insulin are well-known in the art and may be used or routinely |
| | | | insulin secretion | modified to assess the ability of polypeptides of the invention (including antibodies and agonists or |
| | | | from pancreatic | antagonists of the invention) to stimulate insulin secretion. For example, insulin secretion is measured by |
| | | | beta cells. | FMAT using anti-rat insulin antibodies. Insulin secretion from pancreatic beta cells is upregulated by |
| | | | | glucose and also by certain proteins/peptides, and disregulation is a key component in diabetes. |
| | | | | Exemplary assays that may be used or routinely modified to test for stimulation of insulin secretion (from |
| | | | | pancreatic cells) by polypeptides of the invention (including antibodies and agonists or antagonists of the |
| | | | | invention) include assays disclosed in: Ahren, B., et al., Am J Physiol, 277(4 Pt 2): R959-66 (1999); Li, M., |
| | | | | et al., Endocrinology, 138(9): 3735-40 (1997); Kim, K. H., et al., FEBS Lett, 377(2): 237-9 (1995); |
| | | | | and, Miraglia S et. al., Journal of Biomolecular Screening, 4: 193-204 (1999), the contents of each of |
| | | | | which is herein incorporated by reference in its entirety. Pancreatic cells that may be used according to |
| | | | | these assays are publicly available (e.g., through the ATCC) and/or may be routinely generated. |
| | | | | Exemplary pancreatic cells that may be used according to these assays include rat INS-1 cells. INS-1 |
| | | | | cells are a semi-adherent cell line established from cells isolated from an X-ray induced rat transplantable |
| | | | | insulinoma. These cells retain characteristics typical of native pancreatic beta cells including glucose |
| | | | | inducible insulin secretion. References: Asfari et al. Endocrinology 1992 130: 167. |
| 19 | HCE3G69 | 318 | Production of | Assays for production of IL-10 and activation of T-cells are well known in the art and may be used or |
| | | | IL-10 and | routinely modified to assess the ability of polypeptides of the invention (including antibodies and |
| | | | activation of T- | agonists or antagonists of the invention) to stimulate or inhibit production of IL-10 and/or activation of |
| | | | cells. | T-cells. Exemplary assays that may be used or routinely modified to assess the ability of polypeptides |
| | | | | and antibodies of the invention (including agonists or antagonists of the invention) to modulate IL-10 |
| | | | | production and/or T-cell proliferation include, for example, assays such as disclosed and/or cited in: |
| | | | | Robinson, DS, et al., “Th-2 cytokines in allergic disease” Br Med Bull; 56 (4): 956-968 (2000), and |
| | | | | Cohn, et al., “T-helper type 2 cell-directed therapy for asthma” Pharmacology & Therapeutics; 88: 187-196 |
| | | | | (2000); the contents of each of which are herein incorporated by reference in their entirety. |
| | | | | Exemplary cells that may be used according to these assays include Th2 cells. IL10 secreted from Th2 |
| | | | | cells may be measured as a marker of Th2 cell activation. Th2 cells are a class of T cells that secrete |
| | | | | IL4, IL10, IL13, IL5 and IL6. Factors that induce differentiation and activation of Th2 cells play a |
| | | | | major role in the initiation and pathogenesis of allergy and asthma. Primary T helper 2 cells are |
| | | | | generated via in vitro culture under Th2 polarizing conditions using peripheral blood lymphocytes |
| | | | | isolated from cord blood. |
| 20 | HCE5F43 | 319 | Stimulation of | Assays for measuring secretion of insulin are well-known in the art and may be used or routinely |
| | | | insulin secretion | modified to assess the ability of polypeptides of the invention (including antibodies and agonists or |
| | | | from pancreatic beta | antagonists of the invention) to stimulate insulin secretion. For example, insulin secretion is measured by |
| | | | cells. | FMAT using anti-rat insulin antibodies. Insulin secretion from pancreatic beta cells is upregulated by |
| | | | | glucose and also by certain proteins/peptides, and disregulation is a key component in diabetes. |
| | | | | Exemplary assays that may be used or routinely modified to test for stimulation of insulin secretion (from |
| | | | | pancreatic cells) by polypeptides of the invention (including antibodies and agonists or antagonists of the |
| | | | | invention) include assays disclosed in: Ahren, B., et al., Am J Physiol, 277(4 Pt 2): R959-66 (1999); Li, M., |
| | | | | et al., Endocrinology, 138(9): 3735-40 (1997); Kim, K. H., et al., FEBS Lett, 377(2): 237-9 (1995); |
| | | | | and, Miraglia S et. al., Journal of Biomolecular Screening, 4: 193-204 (1999), the contents of each of |
| | | | | which is herein incorporated by reference in its entirety. Pancreatic cells that may be used according to |
| | | | | these assays are publicly available (e.g., through the ATCC) and/or may be routinely generated. |
| | | | | Exemplary pancreatic cells that may be used according to these assays include rat INS-1 cells. INS-1 |
| | | | | cells are a semi-adherent cell line established from cells isolated from an X-ray induced rat transplantable |
| | | | | insulinoma. These cells retain characteristics typical of native pancreatic beta cells including glucose |
| | | | | inducible insulin secretion. References: Asfari et al. Endocrinology 1992 130: 167. |
| 21 | HCEFB80 | 320 | Activation of | Assays for the activation of transcription through the Gamma Interferon Activation Site (GAS) response |
| | | | transcription | element are well-known in the art and may be used or routinely modified to assess the ability of |
| | | | through GAS | polypeptides of the invention (including antibodies and agonists or antagonists of the invention) to |
| | | | response | regulate STAT transcription factors and modulate gene expression involved in a wide variety of cell |
| | | | element in | functions. Exemplary assays for transcription through the GAS response element that may be used or |
| | | | immune cells | routinely modified to test GAS-response element activity of polypeptides of the invention (including |
| | | | (such as T-cells). | antibodies and agonists or antagonists of the invention) include assays disclosed in Berger et al., Gene |
| | | | | 66: 1-10 (1998); Cullen and Malm, Methods in Enzymol 216: 362-368 (1992); Henthorn et al., Proc Natl |
| | | | | Acad Sci USA 85: 6342-6346 (1988); Matikainen et al., Blood 93(6): 1980-1991 (1999); and Henttinen et |
| | | | | al., J Immunol 155(10): 4582-4587 (1995), the contents of each of which are herein incorporated by |
| | | | | reference in its entirety. Exemplary mouse T cells that may be used according to these assays are |
| | | | | publicly available (e.g., through the ATCC). Exemplary T cells that may be used according to these |
| | | | | assays include the CTLL cell line, which is a suspension culture of IL-2 dependent cytotoxic T cells. |
| 21 | HCEFB80 | 320 | Insulin | Assays for measuring secretion of insulin are well-known in the art and may be used or routinely |
| | | | Secretion | modified to assess the ability of polypeptides of the invention (including antibodies and agonists or |
| | | | | antagonists of the invention) to stimulate insulin secretion. For example, insulin secretion is measured by |
| | | | | FMAT using anti-rat insulin antibodies. Insulin secretion from pancreatic beta cells is upregulated by |
| | | | | glucose and also by certain proteins/peptides, and disregulation is a key component in diabetes. |
| | | | | Exemplary assays that may be used or routinely modified to test for stimulation of insulin secretion (from |
| | | | | pancreatic cells) by polypeptides of the invention (including antibodies and agonists or antagonists of the |
| | | | | invention) include assays disclosed in: Shimizu, H., et al., Endocr J, 47(3): 261-9 (2000); Salapatek, A. M., |
| | | | | et al., Mol Endocrinol, 13(8): 1305-17 (1999); Filipsson, K., et al., Ann N Y Acad Sci, 865: 441-4 |
| | | | | (1998); Olson, L. K., et al., J Biol Chem, 271(28): 16544-52 (1996); and, Miraglia S et. al., Journal of |
| | | | | Biomolecular Screening, 4: 193-204 (1999), the contents of each of which is herein incorporated by |
| | | | | reference in its entirety. Pancreatic cells that may be used according to these assays are publicly |
| | | | | available (e.g., through the ATCC) and/or may be routinely generated. Exemplary pancreatic cells that |
| | | | | may be used according to these assays include HITT15 Cells. HITT15 are an adherent epithelial cell line |
| | | | | established from Syrian hamster islet cells transformed with SV40. These cells express glucagon, |
| | | | | somatostatin, and glucocorticoid receptors. The cells secrete insulin, which is stimulated by glucose and |
| | | | | glucagon and suppressed by somatostatin or glucocorticoids. ATTC# CRL-1777 Refs: Lord and |
| | | | | Ashcroft. Biochem. J. 219: 547-551; Santerre et al. Proc. Natl. Acad. Sci. USA 78: 4339-4343, 1981. |
| 22 | HCEWE20 | 321 | Regulation of | Assays for the regulation of transcription of Malic Enzyme are well-known in the art and may be used or |
| | | | transcription of | routinely modified to assess the ability of polypeptides of the invention (including antibodies and |
| | | | Malic Enzyme | agonists or antagonists of the invention) to regulate transcription of Malic Enzyme, a key enzyme in |
| | | | in hepatocytes | lipogenesis. Malic enzyme is involved in lipogenesisand its expression is stimulted by insulin. ME |
| | | | | promoter contains two direct repeat (DR1)- like elements MEp and MEd identified as putative PPAR |
| | | | | response elements. ME promoter may also responds to AP1 and other transcription factors. Exemplary |
| | | | | assays that may be used or routinely modified to test for regulation of transcription of Malic Enzyme (in |
| | | | | hepatocytes) by polypeptides of the invention (including antibodies and agonists or antagonists of the |
| | | | | invention) include assays disclosed in: Streeper, R. S., et al., Mol Endocrinol, 12(11): 1778-91 (1998); |
| | | | | Garcia-Jimenez, C., et al., Mol Endocrinol, 8(10): 1361-9 (1994); Barroso, L; et al., J Biol Chem, |
| | | | | 274(25): 17997-8004 (1999); Ijpenberg, A., et al., J Biol Chem, 272(32): 20108-20117 (1997); Berger, et |
| | | | | al., Gene 66: 1-10 (1988); and, Cullen, B., et al., Methods in Enzymol. 216: 362-368 (1992), the contents |
| | | | | of each of which is herein incorporated by reference in its entirety. Hepatocytes that may be used |
| | | | | according to these assays are publicly available (e.g., through the ATCC) and/or may be routinely |
| | | | | generated. Exemplary hepatocytes that may be used according to these assays includes the mouse 3T3- |
| | | | | L1 cell line. 3T3-L1 is a mouse preadipocyte cell line (adherent). It is a continuous substrain of 3T3 |
| | | | | fibroblasts developed through clonal isolation. Cells undergo a pre-adipocyte to adipose-like conversion |
| | | | | under appropriate differentiation culture conditions. |
| 22 | HCEWE20 | 321 | Production of | Assays for measuring expression of ICAM-1 are well-known in the art and may be used or routinely |
| | | | ICAM-1 | modified to assess the ability of polypeptides of the invention (including antibodies and agonists or |
| | | | | antagonists of the invention) to regulate ICAM-1 expression. Exemplary assays that may be used or |
| | | | | routinely modified to measure ICAM-1 expression include assays disclosed in: Rolfe BE, et al., |
| | | | | Atherosclerosis, 149(1): 99-110 (2000); Panettieri RA Jr, et al., J Immunol, 154(5): 2358-2365 (1995); |
| | | | | and, Grunstein MM, et at., Am J Physiol Lung Cell Mol Physiol, 278(6): L1154-L1163 (2000), the |
| | | | | contents of each of which is herein incorporated by reference in its entirety. Cells that may be used |
| | | | | according to these assays are publicly available (e.g., through the ATCC) and/or may be routinely |
| | | | | generated. Exemplary cells that may be used according to these assays include Aortic Smooth Muscle |
| | | | | Cells (AOSMC); such as bovine AOSMC. |
| 23 | HCGMD59 | 322 | Insulin | Assays for measuring secretion of insulin are well-known in the art and may be used or routinely |
| | | | Secretion | modified to assess the ability of polypeptides of the invention (including antibodies and agonists or |
| | | | | antagonists of the invention) to stimulate insulin secretion. For example, insulin secretion is measured by |
| | | | | FMAT using anti-rat insulin antibodies. Insulin secretion from pancreatic beta cells is upregulated by |
| | | | | glucose and also by certain proteins/peptides, and disregulation is a key component in diabetes. |
| | | | | Exemplary assays that may be used or routinely modified to test for stimulation of insulin secretion (from |
| | | | | pancreatic cells) by polypeptides of the invention (including antibodies and agonists or antagonists of the |
| | | | | invention) include assays disclosed in: Shimizu, H., et al., Endocr J, 47(3): 261-9 (2000); Salapatek, A. M., |
| | | | | et al., Mol Endocrinol, 13(8): 1305-17 (1999); Filipsson, K., et al., Ann N Y Acad Sci, 865: 441-4 |
| | | | | (1998); Olson, L. K., et al., J Biol Chem, 271(28): 16544-52 (1996); and, Miraglia S et. al., Journal of |
| | | | | Biomolecular Screening, 4: 193-204 (1999), the contents of each of which is herein incorporated by |
| | | | | reference in its entirety. Pancreatic cells that may be used according to these assays are publicly |
| | | | | available (e.g., through the ATCC) and/or may be routinely generated. Exemplary pancreatic cells that may be used |
| | | | | according to these assays include HITT15 Cells. HITT15 are an adherent epithelial cell line |
| | | | | established from Syrian hamster islet cells transformed with SV40. These cells express glucagon, |
| | | | | somatostatin, and glucocorticoid receptors. The cells secrete insulin, which is stimulated by glucose and |
| | | | | glucagon and suppressed by somatostatin or glucocorticoids. ATTC# CRL-1777 Refs: Lord and |
| | | | | Ashcroft. Biochem. J. 219: 547-551; Santerre et al. Proc. Natl. Acad. Sci. USA 78: 4339-4343, 1981. |
| 24 | HCNDR47 | 323 | Regulation of | Assays for the regulation of viability and proliferation of cells in vitro are well-known in the art and may |
| | | | viability and | be used or routinely modified to assess the ability of polypeptides of the invention (including antibodies |
| | | | proliferation of | and agonists or antagonists of the invention) to regulate viability and proliferation of pancreatic beta |
| | | | pancreatic beta cells. | cells. For example, the Cell Titer-Gl0 luminescent cell viability assay measures the number of viable |
| | | | | cells in culture based on quantitation of the ATP present which signals the presence of metabolically |
| | | | | active cells. Exemplary assays that may be used or routinely modified to test regulation of viability and |
| | | | | proliferation of pancreatic beta cells by polypeptides of the invention (including antibodies and agonists |
| | | | | or antagonists of the invention) include assays disclosed in: Friedrichsen BN, et al., Mol Endocrinol, |
| | | | | 15(1): 136-48 (2001); Huotari MA, et al., Endocrinology, 139(4): 1494-9 (1998); Hugl SR. et al., J Biol |
| | | | | Chem 1998 Jul 10;273(28): 17771-9 (1998), the contents of each of which is herein incorporated by |
| | | | | reference in its entirety. Pancreatic cells that may be used according to these assays are publicly |
| | | | | available (e.g., through the ATCC) and/or may be routinely generated. Exemplary pancreatic cells that |
| | | | | may be used according to these assays include rat INS-1 cells. INS-1 cells are a semi-adherent cell line |
| | | | | established from cells isolated from an X-ray induced rat transplantable insulinoma. These cells retain |
| | | | | characteristics typical of native pancreatic beta cells including glucose inducible insulin secretion. |
| | | | | References: Asfari et al. Endocrinology 1992 130: 167. |
| 25 | HCNSM70 | 324 | Myoblast cell | Assays for muscle cell proliferation are well known in the art and may be used or routinely modified to |
| | | | proliferation | assess the ability of polypeptides of the invention (including antibodies and agonists or antagonists of the |
| | | | | invention) to stimulate or inhibit myoblast cell proliferation. Exemplary assays for myoblast cell |
| | | | | proliferation that may be used or routinely modified to test activity of polypeptides and antibodies of the |
| | | | | invention (including agonists or antagonists of the invention) include, for example, assays disclosed in: |
| | | | | Soeta, C., et al. “Possible role for the c-ski gene in the proliferation of myogenic cells in regenerating |
| | | | | skeletal muscles of rats” Dev Growth Differ Apr;43(2): 155-64 (2001); Ewton DZ, et al., “IGF binding |
| | | | | proteins-4, -5 and -6 may play specialized roles during L6 myoblast proliferation and differentiation” J |
| | | | | Endocrinol Mar; 144(3): 539-53 (1995); and, Pampusch MS, et al., “Effect of transforming growth factor |
| | | | | beta on proliferation of L6 and embryonic porcine myogenic cells” J Cell Physiol Jun; 143(3): 524-8 |
| | | | | (1990); the contents of each of which are herein incorporated by reference in their entirety. Exemplary |
| | | | | myoblast cells that may be used according to these assays include the rat myoblast L6 cell line. Rat |
| | | | | myoblast L6 cells are an adherent rat myoblast cell line, isolated from primary cultures of rat thigh |
| | | | | muscle, that fuse to form multinucleated myotubes and striated fibers after culture in differentiation |
| | | | | media. |
| 26 | HCUIM65 | 325 | Regulation of | Assays for the regulation of transcription through the DMEF1 response element are well-known in the art |
| | | | transcription via | and may be used or routinely modified to assess the ability of polypeptides of the invention (including |
| | | | DMEF1 | antibodies and agonists or antagonists of the invention) to activate the DMEF1 response element in a |
| | | | response | reporter construct (such as that containing the GLUT4 promoter) and to regulate insulin production. The |
| | | | element in | DMEF1 response element is present in the GLUT4 promoter and binds to MEF2 transcription factor and |
| | | | adipocytes and | another transcription factor that is required for insulin regulation of Glut4 expression in skeletal muscle. |
| | | | pre-adipocytes | GLUT4 is the primary insulin-responsive glucose transporter in fat and muscle tissue. Exemplary assays |
| | | | | that may be used or routinely modified to test for DMEF1 response element activity (in adipocytes and |
| | | | | pre-adipocytes) by polypeptides of the invention (including antibodies and agonists or antagonists of the |
| | | | | invention) include assays disclosed inThai, M. V., et al., J Biol Chem, 273(23): 14285-92 (1998); Mora, S., |
| | | | | et al., J Biol Chem, 275(21): 16323-8 (2000); Liu, M. L., et al., J Biol Chem, 269(45): 28514-21 (1994); |
| | | | | “Identification of a 30-base pair regulatory element and novel DNA binding protein that regulates the |
| | | | | human GLUT4 promoter in transgenic mice”, J Biol Chem. 2000 Aug 4;275(31): 23666-73; Berger, et al., |
| | | | | Gene 66: 1-10 (1988); and, Cullen, B., et al., Methods in Enzymol. 216: 362-368 (1992), the contents of |
| | | | | each of which is herein incorporated by reference in its entirety. Adipocytes and pre-adipocytes that may |
| | | | | be used according to these assays are publicly available (e.g., through the ATCC) and/or may be |
| | | | | routinely generated. Exemplary cells that may be used according to these assays include the mouse 3T3- |
| | | | | L1 cell line which is an adherent mouse preadipocyte cell line. Mouse 3T3-L1 cells are a continuous |
| | | | | substrain of 3T3 fibroblasts developed through clonal isolation. These cells undergo a pre-adipocyte to |
| | | | | adipose-like conversion under appropriate differentiation culture conditions. |
| 26 | HCUIM65 | 325 | Activation of | Assays for the activation of transcription through the cAMP response element are well-known in the art |
| | | | transcription | and may be used or routinely modified to assess the ability of polypeptides of the invention (including |
| | | | through cAMP | antibodies and agonists or antagonists of the invention) to increase cAMP, regulate CREB transcription |
| | | | response | factors, and modulate expression of genes involved in a wide variety of cell functions. For example, a |
| | | | element (CRE) | 3T3-L1/CRE reporter assay may be used to identify factors that activate the cAMP signaling pathway. |
| | | | in pre-adipocytes. | CREB plays a major role in adipogenesis, and is involved in differentiation into adipocytes. CRE |
| | | | | contains the binding sequence for the transcription factor CREB (CRE binding protein). Exemplary |
| | | | | assays for transcription through the cAMP response element that may be used or routinely modified to |
| | | | | test cAMP-response element activity of polypeptides of the invention (including antibodies and agonists |
| | | | | or antagonists of the invention) include assays disclosed in Berger et al., Gene 66: 1-10 (1998); Cullen and Malm, |
| | | | | Methods in Enzymol 216: 362-368 (1992); Henthorn et al., Proc Natl Acad Sci USA 85: 6342-6346 |
| | | | | (1988); Reusch et al., Mol Cell Biol 20(3): 1008-1020 (2000); and Klemm et al., J Biol Chem |
| | | | | 273: 917-923 (1998), the contents of each of which are herein incorporated by reference in its entirety. |
| | | | | Pre-adipocytes that may be used according to these assays are publicly available (e.g., through the |
| | | | | ATCC) and/or may be routinely generated. Exemplary mouse adipocyte cells that may be used according |
| | | | | to these assays include 3T3-L1 cells. 3T3-L1 is an adherent mouse preadipocyte cell line that is a |
| | | | | continuous substrain of 3T3 fibroblast cells developed through clonal isolation and undergo a pre- |
| | | | | adipocyte to adipose-like conversion under appropriate differentiation conditions known in the art. |
| 26 | HCUIM65 | 325 | Activation of | Assays for the activation of transcription through the Serum Response Element (SRB) are well-known in |
| | | | transcription | the art and may be used or routinely modified to assess the ability of polypeptides of the invention |
| | | | through serum | (including antibodies and agonists or antagonists of the invention) to regulate the serum response factors |
| | | | response | and modulate the expression of genes involved in growth. Exemplary assays for transcription through |
| | | | element in pre- | the SRE that may be used or routinely modified to test SRE activity of the polypeptides of the invention |
| | | | adipocytes. | (including antibodies and agonists or antagonists of the invention) include assays disclosed in Berger et |
| | | | | al., Gene 66: 1-10 (1998); Cullen and Malm, Methods in Enzymol 216: 362-368 (1992); Henthorn et al., |
| | | | | Proc Natl Acad Sci USA 85: 6342-6346 (1988); and Black et al., Virus Genes 12(2): 105-117 (1997), the |
| | | | | content of each of which are herein incorporated by reference in its entirety. Pre-adipocytes that may be |
| | | | | used according to these assays are publicly available (e.g., through the ATCC) and/or may be routinely generated. |
| | | | | Exemplary mouse adipocyte cells that may be used according to these assays include 3T3-L1 |
| | | | | cells. 3T3-L1 is an adherent mouse preadipocyte cell line that is a continuous substrain of 3T3 fibroblast |
| | | | | cells developed through clonal isolation and undergo a pre-adipocyte to adipose-like conversion under |
| | | | | appropriate differentiation conditions known in the art. |
| 26 | HCUIM65 | 325 | Stimulation of | Assays for measuring calcium flux are well-known in the art and may be used or routinely modified to |
| | | | Calcium Flux in | assess the ability of polypeptides of the invention (including antibodies and agonists or antagonists of the |
| | | | pancreatic beta | invention) to mobilize calcium. For example, the FLPR assay may be used to measure influx of calcium. |
| | | | cells. | Cells normally have very low concentrations of cytosolic calcium compared to much higher extracellular |
| | | | | calcium. Extracellular factors can cause an influx of calcium, leading to activation of calcium responsive |
| | | | | signaling pathways and alterations in cell functions. Exemplary assays that may be used or routinely |
| | | | | modified to measure calcium flux by polypeptides of the invention (including antibodies and agonists or |
| | | | | antagonists of the invention) include assays disclosed in: Satin LS, et al., Endocrinology, 136(10): 4589-601 |
| | | | | (1995); Mogami H, et al., Endocrinology, 136(7): 2960-6 (1995); Richardson SB, et al., Biochem J, |
| | | | | 288 (Pt 3): 847-51 (1992); and, Meats, JE, et al., Cell Calcium 1989 Nov-Dec; 10(8): 535-41 (1989), the |
| | | | | contents of each of which is herein incorporated by reference in its entirety. Pancreatic cells that may be |
| | | | | used according to these assays are publicly available (e.g., through the ATCC) and/or may be routinely |
| | | | | generated. Exemplary pancreatic cells that may be used according to these assays include HITT15 Cells. |
| | | | | HITT15 are an adherent epithelial cell line established from Syrian hamster islet cells transformed with |
| | | | | SV40. These cells express glucagon, somatostatin, and glucocorticoid receptors. The cells secrete |
| | | | | insulin, which is stimulated by glucose and glucagon and suppressed by somatostatin or glucocorticoids. |
| | | | | ATTC# CRL-1777 Refs: Lord and Ashcroft. Biochem. J. 219: 547-551; Santerre et al. Proc. Natl. |
| | | | | Acad. Sci. USA 78: 4339-4343, 1981. |
| 26 | HCUIM65 | 325 | Activation of | This reporter assay measures activation of the GATA-3 signaling pathway in HMC-1 human mast cell |
| | | | transcription | line. Activation of GATA-3 in mast cells has been linked to cytokine and chemokine production. Assays |
| | | | through GATA- | for the activation of transcription through the GATA3 response element are well-known in the art and |
| | | | 3 response | may be used or routinely modified to assess the ability of polypeptides of the invention (including |
| | | | element in | antibodies and agonists or antagonists of the invention) to regulate GATA3 transcription factors and |
| | | | immune cells | modulate expression of mast cell genes important for immune response development. Exemplary assays |
| | | | (such as mast | for transcription through the GATA3 response element that may be used or routinely modified to test |
| | | | cells). | GATA3-response element activity of polypeptides of the invention (including antibodies and agonists or |
| | | | | antagonists of the invention) include assays disclosed in Berger et al., Gene 66: 1-10 (1998); Cullen and |
| | | | | Malm, Methods in Enzymol 216: 362-368 (1992); Henthorn et al., Proc Natl Acad Sci USA 85: 6342-6346 |
| | | | | (1988); Flavell et al., Cold Spring Harb Symp Quant Biol 64: 563-571 (1999); Rodriguez-Palmero et al, |
| | | | | Eur J Immunol 29(12): 3914-3924 (1999); Zheng and Flavell, Cell 89(4): 587-596 (1997); and Henderson |
| | | | | et al., Mol Cell Biol 14(6): 4286-4294 (1994), the contents of each of which are herein incorporated by |
| | | | | reference in its entirety. Mast cells that may be used according to these assays are publicly available |
| | | | | (e.g., through the ATCC). Exemplary human mast cells that may be used according to these assays |
| | | | | include the HMC-1 cell line, which is an immature human mast cell line established from the peripheral |
| | | | | blood of a patient with mast cell leukemia, and exhibits many characteristics of immature mast cells. |
| 26 | HCUIM65 | 325 | Activation of | This reporter assay measures activation of the NFAT signaling pathway in HMC-1 human mast cell line. |
| | | | transcription | Activation of NFAT in mast cells has been linked to cytokine and chemokine production. Assays for the |
| | | | through NFAT | activation of transcription through the Nuclear Factor of Activated T cells (NFAT) response element are |
| | | | response | well-known in the art and may be used or routinely modified to assess the ability of polypeptides of the |
| | | | element in | invention (including antibodies and agonists or antagonists of the invention) to regulate NFAT |
| | | | immune cells | transcription factors and modulate expression of genes involved in immunomodulatory functions. |
| | | | (such as mast | Exemplary assays for transcription through the NFAT response element that may be used or routinely |
| | | | cells). | modified to test NFAT-response element activity of polypeptides of the invention (including antibodies |
| | | | | and agonists or antagonists of the invention) include assays disclosed in Berger et al., Gene 66: 1-10 |
| | | | | (1998); Cullen and Malm, Methods in Enzymol 216: 362-368 (1992); Henthorn et al., Proc Natl Acad Sci |
| | | | | USA 85: 6342-6346 (1988); De Boer et al., Int J Biochem Cell Biol 31(10): 1221-1236 (1999); Ali et al., J |
| | | | | Immunol 165(12): 7215-7223 (2000); Hutchinson and McCloskey, J Biol Chem 270(27): 16333-16338 |
| | | | | (1995), and Turner et al., J Exp Med 188: 527-537 (1998), the contents of each of which are herein |
| | | | | incorporated by reference in its entirety. Mast cells that may be used according to these assays are |
| | | | | publicly available (e.g., through the ATCC). Exemplary human mast cells that may be used according to |
| | | | | these assays include the HMC-1 cell line, which is an immature human mast cell line established from |
| | | | | the peripheral blood of a patient with mast cell leukemia, and exhibits many characteristics of immature |
| | | | | mast cells. |
| 26 | HCUIM65 | 325 | Activation of | This reporter assay measures activation of the NFkB signaling pathway in HMC-1 human mast cell line. |
| | | | transcription | Activation of NFkB in mast cells has been linked to production of certain cytokines, such as IL-6 and IL- |
| | | | through NFKB | 9. Assays for the activation of transcription through the NFKB response element are well-known in the |
| | | | response | art and may be used or routinely modified to assess the ability of polypeptides of the invention (including |
| | | | element in | antibodies and agonists or antagonists of the invention) to regulate NFKB transcription factors and |
| | | | immune cells | modulate expression of immunomodulatory genes. Exemplary assays for transcription through the |
| | | | (such as mast | NFKB response element that may be used or rountinely modified to test NFKB-response element activity |
| | | | cells). | of polypeptides of the invention (including antibodies and agonists or antagonists of the invention) |
| | | | | include assays disclosed in Berger et al., Gene 66: 1-10 (1998); Cullen and Malm, Methods in Enzymol |
| | | | | 216: 362-368 (1992); Henthorn et al., Proc Natl Acad Sci USA 85: 6342-6346 (1988); Stassen et al, J |
| | | | | Immunol 166(7): 4391-8 (2001); and Marquardt and Walker, J Allergy Clin Immunol 105(3): 500-5 |
| | | | | (2000), the contents of each of which are herein incorporated by reference in its entirety. Mast cells that |
| | | | | may be used according to these assays are publicly available (e.g., through the ATCC). Exemplary |
| | | | | human mast cells that may be used according to these assays include the HMC-1 cell line, which is an |
| | | | | immature human mast cell line established from the peripheral blood of a patient with mast cell leukemia, |
| | | | | and exhibits many characteristics of immature mast cells. |
| 26 | HCUIM65 | 325 | Activation of | Assays for the activation of transcription through the Serum Response Element (SRE) are well-known in |
| | | | transcription | the art and may be used or routinely modified to assess the ability of polypeptides of the invention |
| | | | through serum | (including antibodies and agonists or antagonists of the invention) to bind the serum response factor and |
| | | | response | modulate the expression of genes involved in growth and upregulate the function of growth-related genes |
| | | | element in | in many cell types. Exemplary assays for transcription through the SRE that may be used or routinely |
| | | | immune cells | modified to test SRE activity of the polypeptides of the invention (including antibodies and agonists or |
| | | | (such as T-cells). | antagonists of the invention) include assays disclosed in Berger et al., Gene 66: 1-10 (1998); Cullen and |
| | | | | Malm, Methods in Enzymol 216: 362-368 (1992); Henthorn et al., Proc Natl Acad Sci USA 85: 6342-6346 |
| | | | | (1988); Benson et al., J Immunol 153(9): 3862-3873 (1994); and Black et al., Virus Genes 12(2): 105-117 |
| | | | | (1997), the content of each of which are herein incorporated by reference in its entirety. T cells that may |
| | | | | be used according to these assays are publicly available (e.g., through the ATCC). Exemplary human T |
| | | | | cells, such as the MOLT4, that may be used according to these assays are publicly available (e.g., through the ATCC). |
| 26 | HCUIM65 | 325 | Activation of | Assays for the activation of transcription through the Signal Transducers and Activators of Transcription |
| | | | transcription | (STAT6) response element are well-known in the art and may be used or routinely modified to assess the |
| | | | through STAT6 | ability of polypeptides of the invention (including antibodies and agonists or antagonists of the invention) |
| | | | response | to regulate STAT6 transcription factors and modulate the expression of multiple genes. Exemplary |
| | | | element in | assays for transcription through the STAT6 response element that may be used or routinely modified to |
| | | | immune cells | test STAT6 response element activity of the polypeptides of the invention (including antibodies and |
| | | | (such as natural | agonists or antagonists of the invention) include assays disclosed in Berger et al., Gene 66: 1-10 (1998); |
| | | | killer cells). | Cullen and Malm, Methods in Enzymol 216: 362-368 (1992); Henthorn et al., Proc Natl Acad Sci USA |
| | | | | 85: 6342-6346 (1988); Georas et al., Blood 92(12): 4529-4538 (1998); Moffatt et al., Transplantation |
| | | | | 69(7): 1521-1523 (2000); Curiel et al., Eur J Immunol 27(8): 1982-1987 (1997); and Masuda et al., J Biol |
| | | | | Chem 275(38): 29331-29337 (2000), the contents of each of which are herein incorporated by reference in |
| | | | | its entirety. T cells that may be used according to these assays are publicly available (e.g., through the |
| | | | | ATCC). Exemplary rat natural killer cells that may be used according to these assays are publicly available (e.g., through |
| | | | | the ATCC). |
| 26 | HCUIM65 | 325 | Activation of | Assays for the activation of transcription through the Gamma Interferon Activation Site (GAS) response |
| | | | transcription | element are well-known in the art and may be used or routinely modified to assess the ability of |
| | | | through GAS | polypeptides of the invention (including antibodies and agonists or antagonists of the invention) to |
| | | | response | regulate STAT transcription factors and modulate gene expression involved in a wide variety of cell |
| | | | element in | functions. Exemplary assays for transcription through the GAS response element that may be used or |
| | | | immune cells | routinely modified to test GAS-response element activity of polypeptides of the invention (including |
| | | | (such as T- | antibodies and agonists or antagonists of the invention) include assays disclosed in Berger et al., Gene |
| | | | cells). | 66: 1-10 (1998); Cullen and Malm, Methods in Enzymol 216: 362-368 (1992); Henthorn et al., Proc Natl |
| | | | | Acad Sci USA 85: 6342-6346 (1988); Matikainen et al., Blood 93(6): 1980-1991 (1999); and Henttinen et |
| | | | | al., J Immunol 155(10): 4582-4587 (1995), the contents of each of which are herein incorporated by |
| | | | | reference in its entirety. Exemplary human T cells, such as the SUPT cell line, that may be used |
| | | | | according to these assays are publicly available (e.g., through the ATCC). |
| 26 | HCUIM65 | 325 | Activation of | Assays for the activation of transcription through the Nuclear Factor of Activated T cells (NFAT) |
| | | | transcription | response element are well-known in the art and may be used or routinely modified to assess the ability of |
| | | | through NFAT | polypeptides of the invention (including antibodies and agonists or antagonists of the invention) to |
| | | | response | regulate NFAT transcription factors and modulate expression of genes involved in immunomodulatory |
| | | | element in | functions. Exemplary assays for transcription through the NFAT response element that may be used or |
| | | | immune cells | routinely modified to test NFAT-response element activity of polypeptides of the invention (including |
| | | | (such as natural | antibodies and agonists or antagonists of the invention) include assays disclosed in Berger et al., Gene |
| | | | killer cells). | 66: 1-10 (1998); Cullen and Malm, Methods in Enzymol 216: 362-368 (1992); Henthorn et al., Proc Natl |
| | | | | Acad Sci USA 85: 6342-6346 (1988); Aramburu et a., J Exp Med 182(3): 801-810 (1995); De Boer et al., |
| | | | | Int J Biochem Cell Biol 31(10): 1221-1236 (1999); Fraser et al., Eur J Immunol 29(3): 838-844 (1999); |
| | | | | and Yeseen et al., J Biol Chem 268(19): 14285-14293 (1993), the contents of each of which are herein |
| | | | | incorporated by reference in its entirety. NK cells that may be used according to these assays are |
| | | | | publicly available (e.g., through the ATCC). Exemplary human NK cells that may be used according to |
| | | | | these assays include the NK-YT cell line, which is a human natural killer cell line with cytolytic and |
| | | | | cytotoxic activity. |
| 26 | HCUIM65 | 325 | Activation of | Assays for the activation of transcription through the Serum Response Element (SRE) are well-known in |
| | | | transcription | the art and may be used or routinely modified to assess the ability of polypeptides of the invention |
| | | | through serum | (including antibodies and agonists or antagonists of the invention) to regulate serum response factors and |
| | | | response | modulate the expression of genes involved in growth and upregulate the function of growth-related genes |
| | | | element in | in many cell types. Exemplary assays for transcription through the SRE that may be used or routinely |
| | | | immune cells | modified to test SRE activity of the polypeptides of the invention (including antibodies and agonists or |
| | | | (such as natural | antagonists of the invention) include assays disclosed in Berger et al., Gene 66: 1-10 (1998); Cullen and |
| | | | killer cells). | Malm, Methods in Enzymol 216: 362-368 (1992); Henthorn et al., Proc Natl Acad Sci USA 85: 6342-6346 |
| | | | | (1988); Benson et al., J Immunol 153(9): 3862-3873 (1994); and Black et al., Virus Genes 12(2): 105-117 |
| | | | | (1997), the content of each of which are herein incorporated by reference in its entirety. T cells that may |
| | | | | be used according to these assays are publicly available (e.g., through the ATCC). Exemplary T cells |
| | | | | that may be used according to these assays include the NK-YT cell line, which is a human natural killer |
| | | | | cell line with cytolytic and cytotoxic activity. |
| 27 | HCWDS72 | 326 | Regulation of | Assays for the regulation of transcription of Malic Enzyme are well-known in the art and may be used or |
| | | | transcription of | routinely modified to assess the ability of polypeptides of the invention (including antibodies and |
| | | | Malic Enzyme | agonists or antagonists of the invention) to regulate transcription of Malic Enzyme, a key enzyme in |
| | | | in adipocytes | lipogenesis. Malic enzyme is involved in lipogenesisand its expression is stimulted by insulin. ME |
| | | | | promoter contains two direct repeat (DR1)-like elements MEp and MEd identified as putative PPAR |
| | | | | response elements. ME promoter may also responds to AP1 and other transcription factors. Exemplary |
| | | | | assays that may be used or routinely modified to test for regulation of transcription of Malic Enzyme (in |
| | | | | adipoocytes) by polypeptides of the invention (including antibodies and agonists or antagonists of the |
| | | | | invention) include assays disclosed in: Streeper, R. S., et al., Mol Endocrinol, 12(11): 1778-91 (1998); |
| | | | | Garcia-Jimenez, C., et al., Mol Endocrinol, 8(10): 1361-9 (1994); Barroso, I., et al., J Biol Chem, |
| | | | | 274(25): 17997-8004 (1999); Ijpenberg, A., et al., J Biol Chem, 272(32): 20108-20117 (1997); Berger, et |
| | | | | al., Gene 66: 1-10 (1988); and, Cullen, B., et al., Methods in Enzymol. 216: 362-368 (1992), the contents |
| | | | | of each of which is herein incorporated by reference in its entirety. Hepatocytes that may be used |
| | | | | according to these assays are publicly available (e.g., through the ATCC) and/or may be routinely |
| | | | | generated. Exemplary hepatocytes that may be used according to these assays includes the H4IIE rat |
| | | | | liver hepatoma cell line. |
| 28 | HCWKC15 | 327 | Regulation of | Assays for the regulation of transcription through the DMEF1 response element are well-known in the art |
| | | | transcription via | and may be used or routinely modified to assess the ability of polypeptides of the invention (including |
| | | | DMEF1 | antibodies and agonists or antagonists of the invention) to activate the DMEF1 response element in a |
| | | | response | reporter construct (such as that containing the GLUT4 promoter) and to regulate insulin production. The |
| | | | element in | DMEF1 response element is present in the GLUT4 promoter and binds to MEF2 transcription factor and |
| | | | adipocytes and | another transcription factor that is required for insulin regulation of Glut4 expression in skeletal muscle. |
| | | | pre-adipocytes | GLUT4 is the primary insulin-responsive glucose transporter in fat and muscle tissue. Exemplary assays |
| | | | | that may be used or routinely modified to test for DMEF1 response element activity (in adipocytes and |
| | | | | pre-adipocytes) by polypeptides of the invention (including antibodies and agonists or antagonists of the |
| | | | | invention) include assays disclosed inThai, M. V., et al., J Biol Chem, 273(23): 14285-92 (1998); Mora, S., |
| | | | | et al, J Biol Chem, 275(21): 16323-8 (2000); Liu, M. L., et al, J Biol Chem, 269(45): 28514-21 (1994); |
| | | | | “Identification of a 30-base pair regulatory element and novel DNA binding protein that regulates the |
| | | | | human GLUT4 promoter in transgenic mice”, J Biol Chem. 2000 Aug 4; 275(31): 23666-73; Berger, et al., |
| | | | | Gene 66: 1-10 (1988); and, Cullen, B., et al., Methods in Enzymol. 216: 362-368 (1992), the contents of |
| | | | | each of which is herein incorporated by reference in its entirety. Adipocytes and pre-adipocytes that may |
| | | | | be used according to these assays are publicly available (e.g., through the ATCC) and/or may be |
| | | | | routinely generated. Exemplary cells that may be used according to these assays include the mouse 3T3- |
| | | | | L1 cell line which is an adherent mouse preadipocyte cell line. Mouse 3T3-L1 cells are a continuous |
| | | | | substrain of 3T3 fibroblasts developed through clonal isolation. These cells undergo a pre-adipocyte to |
| | | | | adipose-like conversion under appropriate differentiation culture conditions. |
| 28 | HCWKC15 | 327 | Activation of | Assays for the activation of transcription through the cAMP response element are well-known in the art |
| | | | transcription | and may be used or routinely modified to assess the ability of polypeptides of the invention (including |
| | | | through cAMP | antibodies and agonists or antagonists of the invention) to increase cAMP, regulate CREB transcription |
| | | | response | factors, and modulate expression of genes involved in a wide variety of cell functions. For example, a |
| | | | element (CRE) | 3T3-L1/CRE reporter assay may be used to identify factors that activate the cAMP signaling pathway. |
| | | | in pre- | CREB plays a major role in adipogenesis, and is involved in differentiation into adipocytes. CRE |
| | | | adipocytes. | contains the binding sequence for the transcription factor CREB (CRE binding protein). Exemplary |
| | | | | assays for transcription through the cAMP response element that may be used or routinely modified to |
| | | | | test cAMP-response element activity of polypeptides of the invention (including antibodies and agonists |
| | | | | or antagonists of the invention) include assays disclosed in Berger et al., Gene 66: 1-10 (1998); Cullen |
| | | | | and Malm, Methods in Enzymol 216: 362-368 (1992); Henthorn et al., Proc Natl Acad Sci USA 85: 6342-6346 |
| | | | | (1988); Reusch et al., Mol Cell Biol 20(3): 1008-1020 (2000); and Klemm et al., J Biol Chem |
| | | | | 273: 917-923 (1998), the contents of each of which are herein incorporated by reference in its entirety. |
| | | | | Pre-adipocytes that may be used according to these assays are publicly available (e.g., through the |
| | | | | ATCC) and/or may be routinely generated. Exemplary mouse adipocyte cells that may be used according |
| | | | | to these assays include 3T3-L1 cells. 3T3-L1 is an adherent mouse preadipocyte cell line that is a |
| | | | | continuous substrain of 3T3 fibroblast cells developed through clonal isolation and undergo a pre- |
| | | | | adipocyte to adipose-like conversion under appropriate differentiation conditions known in the art. |
| 28 | HCWKC15 | 327 | Activation of | Assays for the activation of transcription through the Serum Response Element (SRE) are well-known in |
| | | | transcription | the art and may be used or routinely modified to assess the ability of polypeptides of the invention |
| | | | through serum | (including antibodies and agonists or antagonists of the invention) to regulate the serum response factors |
| | | | response | and modulate the expression of genes involved in growth. Exemplary assays for transcription through |
| | | | element in pre- | the SRE that may be used or routinely modified to test SRE activity of the polypeptides of the invention |
| | | | adipocytes. | (including antibodies and agonists or antagonists of the invention) include assays disclosed in Berger et |
| | | | | al., Gene 66: 1-10 (1998); Cullen and Malm, Methods in Enzymol 216: 362-368 (1992); Henthorn et al., |
| | | | | Proc Natl Acad Sci USA 85: 6342-6346 (1988); and Black et al., Virus Genes 12(2): 105-117 (1997), the |
| | | | | content of each of which are herein incorporated by reference in its entirety. Pre-adipocytes that may be |
| | | | | used according to these assays are publicly available (e.g., through the ATCC) and/or may be routinely |
| | | | | generated. Exemplary mouse adipocyte cells that may be used according to these assays include 3T3-L1 |
| | | | | cells. 3T3-L1 is an adherent mouse preadipocyte cell line that is a continuous substrain of 3T3 fibroblast |
| | | | | cells developed through clonal isolation and undergo a pre-adipocyte to adipose-like conversion under |
| | | | | appropriate differentiation conditions known in the art. |
| 28 | HCWKC15 | 327 | Activation of | Assays for the activation of transcription through the Gamma Interferon Activation Site (GAS) response |
| | | | transcription | element are well-known in the art and may be used or routinely modified to assess the ability of |
| | | | through GAS | polypeptides of the invention (including antibodies and agonists or antagonists of the invention) to |
| | | | response | modulate gene expression (commonly via STAT transcription factors) involved in a wide variety of cell |
| | | | element in | functions. Exemplary assays for transcription through the GAS response element that may be used or |
| | | | immune cells | routinely modified to test GAS-response element activity of polypeptides of the invention (including |
| | | | (such as | antibodies and agonists or antagonists of the invention) include assays disclosed in Berger et al., Gene |
| | | | eosinophils). | 66: 1-10 (1998); Cullen and Malm, Methods in Enzymol 216: 362-368 (1992); Henthorn et al., Proc Natl |
| | | | | Acad Sci USA 85: 6342-6346 (1988); Matikainen et al, Blood 93(6): 1980-1991 (1999); and Henttinen et |
| | | | | al., J Immunol 155(10): 4582-4587 (1995); the contents of each of which are herein incorporated by |
| | | | | reference in its entirety. Moreover, exemplary assays that may be used or routinely modified to assess |
| | | | | the ability of polypeptides of the invention (including antibodies and agonists or antagonists of the |
| | | | | invention) to activate or inhibit activation of immune cells include assays disclosed and/or cited in: |
| | | | | Mayumi M., “EoL-1, a human eosinophilic cell line” Leuk Lymphoma; Jun; 7(3): 243-50 (1992); |
| | | | | Bhattacharya S, “Granulocyte macrophage colony-stimulating factor and interleukin-5 activate STAT5 |
| | | | | and induce CIS1 mRNA in human peripheral blood eosinophils” Am J Respir Cell Mol Biol; |
| | | | | Mar; 24(3): 312-6 (2001); and, Du J, et al., “Engagement of the CrkL adapter in interleukin-5 signaling in |
| | | | | eosinophils” J Biol Chem; Oct 20; 275(42): 33167-75 (2000); the contents of each of which are herein |
| | | | | incorporated by reference in its entirety. Exemplary cells that may be used according to these assays |
| | | | | include eosinophils. Eosinophils are a type of immune cell important in the late stage of allergic |
| | | | | reactions; they are recruited to tissues and mediate the inflammtory response of late stage allergic |
| | | | | reaction. Increases in GAS mediated transcription in eosinophils is typically a result of STAT activation, |
| | | | | normally a direct consequence of interleukin or other cytokine receptor stimulation (e.g. IL3, IL5 or |
| | | | | GMCSF). |
| 28 | HCWKC15 | 327 | Activation of | Assays for the activation of transcription through the NFKB response element are well-known in the art |
| | | | transcription | and may be used or routinely modified to assess the ability of polypeptides of the invention (including |
| | | | through NFKB | antibodies and agonists or antagonists of the invention) to regulate NFKB transcription factors and |
| | | | response | modulate expression of immunomodulatory genes. Exemplary assays for transcription through the |
| | | | element in | NFKB response element that may be used or rountinely modified to test NFKB-response element activity |
| | | | immune cells | of polypeptides of the invention (including antibodies and agonists or antagonists of the invention) |
| | | | (such as EOL1 | include assays disclosed in Berger et al., Gene 66: 1-10 (1998); Cullen and Malm, Methods in Enzymol |
| | | | cells). | 216: 362-368 (1992); Henthorn et al., Proc Natl Acad Sci USA 85: 6342-6346 (1988); Valle Blazquez et |
| | | | | al, Immunology 90(3): 455-460 (1997); Aramburau et al., J Exp Med 82(3): 801-810 (1995); and Fraser et |
| | | | | al., 29(3): 838-844 (1999), the contents of each of which are herein incorporated by reference in its |
| | | | | entirety. For example, a reporter assay (which measures increases in transcription inducible from a |
| | | | | NFkB responsive element in EOL-1 cells) may link the NFKB element to a repeorter gene and binds to |
| | | | | the NFKB transcription factor, which is upregulated by cytokines and other factors. Exemplary immune |
| | | | | cells that may be used according to these assays include eosinophils such as the human EOL-1 cell line of |
| | | | | eosinophils. Eosinophils are a type of immune cell important in the allergic responses; they are recruited |
| | | | | to tissues and mediate the inflammtory response of late stage allergic reaction. Eol-1 is a human |
| | | | | eosinophil cell line. |
| 28 | HCWKC15 | 327 | Activation of | This reporter assay measures activation of the GATA-3 signaling pathway in HMC-1 human mast cell |
| | | | transcription | line. Activation of GATA-3 in mast cells has been linked to cytokine and chemokine production. Assays |
| | | | through GATA- | for the activation of transcription through the GATA3 response element are well-known in the art and |
| | | | 3 response | may be used or routinely modified to assess the ability of polypeptides of the invention (including |
| | | | element in | antibodies and agonists or antagonists of the invention) to regulate GATA3 transcription factors and |
| | | | immune cells | modulate expression of mast cell genes important for immune response development. Exemplary assays |
| | | | (such as mast | for transcription through the GATA3 response element that may be used or routinely modified to test |
| | | | cells). | GATA3-response element activity of polypeptides of the invention (including antibodies and agonists or |
| | | | | antagonists of the invention) include assays disclosed in Berger et al., Gene 66: 1-10 (1998); Cullen and |
| | | | | Malm, Methods in Enzymol 216: 362-368 (1992); Henthorn et al., Proc Natl Acad Sci USA 85: 6342-6346 |
| | | | | (1988); Flavell et al., Cold Spring Harb Symp Quant Biol 64: 563-571 (1999); Rodriguez-Palmero et al., |
| | | | | Eur J Immunol 29(12): 3914-3924 (1999); Zheng and Flavell, Cell 89(4): 587-596 (1997); and Henderson |
| | | | | et al., Mol Cell Biol 14(6): 4286-4294 (1994), the contents of each of which are herein incorporated by |
| | | | | reference in its entirety. Mast cells that may be used according to these assays are publicly available |
| | | | | (e.g., through the ATCC). Exemplary human mast cells that may be used according to these assays |
| | | | | include the HMC-1 cell line, which is an immature human mast cell line established from the peripheral |
| | | | | blood of a patient with mast cell leukemia, and exhibits many characteristics of immature mast cells. |
| 28 | HCWKC15 | 327 | Activation of | This reporter assay measures activation of the NFAT signaling pathway in HMC-1 human mast cell line. |
| | | | transcription | Activation of NFAT in mast cells has been linked to cytokine and chemokine production. Assays for the |
| | | | through NFAT | activation of transcription through the Nuclear Factor of Activated T cells (NFAT) response element are |
| | | | response | well-known in the art and may be used or routinely modified to assess the ability of polypeptides of the |
| | | | element in | invention (including antibodies and agonists or antagonists of the invention) to regulate NFAT |
| | | | immune cells | transcription factors and modulate expression of genes involved in immunomodulatory functions. |
| | | | (such as mast | Exemplary assays for transcription through the NFAT response element that may be used or routinely |
| | | | cells). | modified to test NFAT-response element activity of polypeptides of the invention (including antibodies |
| | | | | and agonists or antagonists of the invention) include assays disclosed in Berger et al., Gene 66: 1-10 |
| | | | | (1998); Cullen and Malm, Methods in Enzymol 216: 362-368 (1992); Henthorn et al., Proc Natl Acad Sci |
| | | | | USA 85: 6342-6346 (1988); De Boer et al., Int J Biochem Cell Biol 31(10): 1221-1236 (1999); Ali et al., J |
| | | | | Immunol 165(12): 7215-7223 (2000); Hutchinson and McCloskey, J Biol Chem 270(27): 16333-16338 |
| | | | | (1995), and Turner et al., J Exp Med 188: 527-537 (1998), the contents of each of which are herein |
| | | | | incorporated by reference in its entirety. Mast cells that may be used according to these assays are |
| | | | | publicly available (e.g., through the ATCC). Exemplary human mast cells that may be used according to |
| | | | | these assays include the HMC-1 cell line, which is an immature human mast cell line established from |
| | | | | the peripheral blood of a patient with mast cell leukemia, and exhibits many characteristics of immature |
| | | | | mast cells. |
| 28 | HCWKC15 | 327 | Activation of | This reporter assay measures activation of the NFkB signaling pathway in HMC-1 human mast cell line. |
| | | | transcription | Activation of NFkB in mast cells has been linked to production of certain cytokines, such as IL-6 and IL- |
| | | | through NFKB | 9. Assays for the activation of transcription through the NFKB response element are well-known in the |
| | | | response | art and may be used or routinely modified to assess the ability of polypeptides of the invention (including |
| | | | element in | antibodies and agonists or antagonists of the invention) to regulate NFKB transcription factors and |
| | | | immune cells | modulate expression of immunomodulatory genes. Exemplary assays for transcription through the |
| | | | (such as mast | NFKB response element that may be used or rountinely modified to test NFKB-response element activity |
| | | | cells). | of polypeptides of the invention (including antibodies and agonists or antagonists of the invention) |
| | | | | include assays disclosed in Berger et al., Gene 66: 1-10 (1998); Cullen and Malm, Methods in Enzymol |
| | | | | 216: 362-368 (1992); Henthorn et al., Proc Natl Acad Sci USA 85: 6342-6346 (1988); Stassen et al, J |
| | | | | Immunol 166(7): 4391-8 (2001); and Marquardt and Walker, J Allergy Clin Immunol 105(3): 500-5 |
| | | | | (2000), the contents of each of which are herein incorporated by reference in its entirety. Mast cells that |
| | | | | may be used according to these assays are publicly available (e.g., through the ATCC). Exemplary |
| | | | | human mast cells that may be used according to these assays include the HMC-1 cell line, which is an |
| | | | | immature human mast cell line established from the peripheral blood of a patient with mast cell leukemia, |
| | | | | and exhibits many characteristics of immature mast cells. |
| 28 | HCWKC15 | 327 | Activation of | Assays for the activation of transcription through the Signal Transducers and Activators of Transcription |
| | | | transcription | (STAT6) response element in immune cells (such as in the human HMC-1 mast cell line) are well-known |
| | | | through STAT6 | in the art and may be used or routinely modified to assess the ability of polypeptides of the invention |
| | | | response | (including antibodies and agonists or antagonists of the invention) to regulate STAT6 transcription |
| | | | element in | factors and modulate the expression of multiple genes. Exemplary assays for transcription through the |
| | | | immune cells | STAT6 response element that may be used or routinely modified to test STAT6 response element activity |
| | | | (such as mast | of the polypeptides of the invention (including antibodies and agonists or antagonists of the invention) |
| | | | cells). | include assays disclosed in Berger et al., Gene 66: 1-10 (1998); Cullen and Malm, Methods in Enzymol |
| | | | | 216: 362-368 (1992); Henthorn et al., Proc Natl Acad Sci USA 85: 6342-6346 (1988); Sherman, Immunol |
| | | | | Rev 179: 48-56 (2001); Malaviya and Uckun, J Immunol 168: 421-426 (2002); Masuda et al., J Biol Chem |
| | | | | 275(38): 29331-29337 (2000); and Masuda et al., J Biol Chem 276: 26107-26113 (2001), the contents of |
| | | | | each of which are herein incorporated by reference in its entirety. Mast cells that may be used according |
| | | | | to these assays are publicly available (e.g., through the ATCC). Exemplary human mast cells that may be |
| | | | | used according to these assays include the HMC-1 cell line, which is an immature human mast cell line |
| | | | | established from the peripheral blood of a patient with mast cell leukemia, and exhibits many |
| | | | | characteristics of immature mast cells. |
| 28 | HCWKC15 | 327 | Activation of | This reporter assay measures activation of the NFkB signaling pathway in Ku812 human basophil cell |
| | | | transcription | line. Assays for the activation of transcription through the NFKB response element are well-known in the |
| | | | through NFKB | art and may be used or routinely modified to assess the ability of polypeptides of the invention (including |
| | | | response | antibodies and agonists or antagonists of the invention) to regulate NFKB transcription factors and |
| | | | element in | modulate expression of immunomodulatory genes. Exemplary assays for transcription through the |
| | | | immune cells | NFKB response element that may be used or rountinely modified to test NFKB-response element activity |
| | | | (such as | of polypeptides of the invention (including antibodies and agonists or antagonists of the invention) |
| | | | basophils). | include assays disclosed in Berger et al., Gene 66: 1-10 (1998); Cullen and Malm, Methods in Enzymol |
| | | | | 216: 362-368 (1992); Henthorn et al., Proc Natl Acad Sci USA 85: 6342-6346 (1988); Marone et al, Int |
| | | | | Arch Allergy Immunol 114(3): 207-17 (1997), the contents of each of which are herein incorporated by |
| | | | | reference in its entirety. Basophils that may be used according to these assays are publicly available |
| | | | | (e.g., through the ATCC). Exemplary human basophil cell lines that may be used according to these |
| | | | | assays include Ku812, originally established from a patient with chronic myelogenous leukemia. It is an |
| | | | | immature prebasophilic cell line that can be induced to differentiate into mature basophils. |
| 28 | HCWKC15 | 327 | Activation of | Assays for the activation of transcription through the Serum Response Element (SRE) are well-known in |
| | | | transcription | the art and may be used or routinely modified to assess the ability of polypeptides of the invention |
| | | | through serum | (including antibodies and agonists or antagonists of the invention) to bind the serum response factor and |
| | | | response | modulate the expression of genes involved in growth and upregulate the function of growth-related genes |
| | | | element in | in many cell types. Exemplary assays for transcription through the SRE that may be used or routinely |
| | | | immune cells | modified to test SRE activity of the polypeptides of the invention (including antibodies and agonists or |
| | | | (such as T- | antagonists of the invention) include assays disclosed in Berger et al., Gene 66: 1-10 (1998); Cullen and |
| | | | cells). | Malm, Methods in Enzymol 216: 362-368 (1992); Henthorn et al., Proc Natl Acad Sci USA 85: 6342-6346 |
| | | | | (1988); Benson et al., J Immunol 153(9): 3862-3873 (1994); and Black et al., Virus Genes 12(2): 105-117 |
| | | | | (1997), the content of each of which are herein incorporated by reference in its entirety. T cells that may |
| | | | | be used according to these assays are publicly available (e.g., through the ATCC). Exemplary human T |
| | | | | cells, such as the MOLT4, that may be used according to these assays are publicly available (e.g., through |
| | | | | the ATCC). |
| 28 | HCWKC15 | 327 | Activation of | Assays for the activation of transcription through the NFKB response element are well-known in the art |
| | | | transcription | and may be used or routinely modified to assess the ability of polypeptides of the invention (including |
| | | | through NFKB | antibodies and agonists or antagonists of the invention) to regulate NFKB transcription factors and |
| | | | response | modulate expression of immunomodulatory genes. Exemplary assays for transcription through the |
| | | | element in | NFKB response element that may be used or rountinely modified to test NFKB-response element activity |
| | | | immune cells | of polypeptides of the invention (including antibodies and agonists or antagonists of the invention) |
| | | | (such as natural | include assays disclosed in Berger et al., Gene 66: 1-10 (1998); Cullen and Malm, Methods in Enzymol |
| | | | killer cells). | 216: 362-368 (1992); Henthorn et al., Proc Natl Acad Sci USA 85: 6342-6346 (1988); Valle Blazquez et |
| | | | | al, Immunology 90(3): 455-460 (1997); Aramburau et al., J Exp Med 82(3): 801-810 (1995); and Fraser et |
| | | | | al., 29(3): 838-844 (1999), the contents of each of which are herein incorporated by reference in its |
| | | | | entirety. NK cells that may be used according to these assays are publicly available (e.g., through the |
| | | | | ATCC). Exemplary NK cells that may be used according to these assays include the NK-YT cell line, |
| | | | | which is a human natural killer cell line with cytolytic and cytotoxic activity. |
| 28 | HCWKC15 | 327 | Activation of | Assays for the activation of transcription through the Signal Transducers and Activators of Transcription |
| | | | transcription | (STAT6) response element are well-known in the art and may be used or routinely modified to assess the |
| | | | through STAT6 | ability of polypeptides of the invention (including antibodies and agonists or antagonists of the invention) |
| | | | response | to regulate STAT6 transcription factors and modulate the expression of multiple genes. Exemplary |
| | | | element in | assays for transcription through the STAT6 response element that may be used or routinely modified to |
| | | | immune cells | test STAT6 response element activity of the polypeptides of the invention (including antibodies and |
| | | | (such as natural | agonists or antagonists of the invention) include assays disclosed in Berger et al., Gene 66: 1-10 (1998); |
| | | | killer cells). | Cullen and Malm, Methods in Enzymol 216: 362-368 (1992); Henthorn et al., Proc Natl Acad Sci USA |
| | | | | 85: 6342-6346 (1988); Georas et al., Blood 92(12): 4529-4538 (1998); Moffatt et al., Transplantation |
| | | | | 69(7): 1521-1523 (2000); Curiel et al., Eur J Immunol 27(8): 1982-1987 (1997); and Masuda et al., J Biol |
| | | | | Chem 275(38): 29331-29337 (2000), the contents of each of which are herein incorporated by reference in |
| | | | | its entirety. T cells that may be used according to these assays are publicly available (e.g., through the |
| | | | | ATCC). Exemplary rat natural killer cells that may be used according to these assays are publicly |
| | | | | available (e.g., through the ATCC). |
| 28 | HCWKC15 | 327 | Activation of | Assays for the activation of transcription through the AP1 response element are well-known in the art and |
| | | | transcription | may be used or routinely modified to assess the ability of polypeptides of the invention (including |
| | | | through AP1 | antibodies and agonists or antagonists of the invention) to modulate growth and other cell functions. |
| | | | response | Exemplary assays for transcription through the AP1 response element that may be used or routinely |
| | | | element in | modified to test AP1-response element activity of polypeptides of the invention (including antibodies and |
| | | | immune cells | agonists or antagonists of the invention) include assays disclosed in Berger et al., Gene 66: 1-10 (1988); |
| | | | (such as T- | Cullen and Malm, Methods in Enzymol 216: 362-368 (1992); Henthorn et al., Proc Natl Acad Sci USA |
| | | | cells). | 85: 6342-6346 (1988); Rellahan et al., J Biol Chem 272(49): 30806-30811 (1997); Chang et al., Mol Cell |
| | | | | Biol 18(9): 4986-4993 (1998); and Fraser et al., Eur J Immunol 29(3): 838-844 (1999), the contents of |
| | | | | each of which are herein incorporated by reference in its entirety. Human T cells that may be used |
| | | | | according to these assays are publicly available (e.g., through the ATCC). Exemplary human T cells that |
| | | | | may be used according to these assays include the SUPT cell line, which is an IL-2 and IL-4 responsive |
| | | | | suspension-culture cell line. |
| 28 | HCWKC15 | 327 | Activation of | Assays for the activation of transcription through the CD28 response element are well-known in the art |
| | | | transcription | and may be used or routinely modified to assess the ability of polypeptides of the invention (including |
| | | | through CD28 | antibodies and agonists or antagonists of the invention) to stimulate IL-2 expression in T cells. |
| | | | response | Exemplary assays for transcription through the CD28 response element that may be used or routinely |
| | | | element in | modified to test CD28-response element activity of polypeptides of the invention (including antibodies |
| | | | immune cells | and agonists or antagonists of the invention) include assays disclosed in Berger et al., Gene 66: 1-10 |
| | | | (such as T- | (1998); Cullen and Malm, Methods in Enzymol 216: 362-368 (1992); Henthorn et al., Proc Natl Acad Sci |
| | | | cells). | USA 85: 6342-6346 (1988); McGuire and Iacobelli, J Immunol 159(3): 1319-1327 (1997); Parra et al., J |
| | | | | Immunol 166(4): 2437-2443 (2001); and Butscher et al., J Biol Chem 3(1): 552-560 (1998), the contents |
| | | | | of each of which are herein incorporated by reference in its entirety. T cells that may be used according |
| | | | | to these assays are publicly available (e.g., through the ATCC). Exemplary human T cells that may be |
| | | | | used according to these assays include the SUPT cell line, which is a suspension culture of IL-2 and IL-4 |
| | | | | responsive T cells. |
| 28 | HCWKC15 | 327 | Activation of | Assays for the activation of transcription through the Gamma Interferon Activation Site (GAS) response |
| | | | transcription | element are well-known in the art and may be used or routinely modified to assess the ability of |
| | | | through GAS | polypeptides of the invention (including antibodies and agonists or antagonists of the invention) to |
| | | | response | regulate STAT transcription factors and modulate gene expression involved in a wide variety of cell |
| | | | element in | functions. Exemplary assays for transcription through the GAS response element that may be used or |
| | | | immune cells | routinely modified to test GAS-response element activity of polypeptides of the invention (including |
| | | | (such as T- | antibodies and agonists or antagonists of the invention) include assays disclosed in Berger et al., Gene |
| | | | cells). | 66: 1-10 (1998); Cullen and Malm, Methods in Enzymol 216: 362-368 (1992); Henthorn et al., Proc Natl |
| | | | | Acad Sci USA 85: 6342-6346 (1988); Matikainen et al., Blood 93(6): 1980-1991 (1999); and Henttinen et |
| | | | | al., J Immunol 155(10): 4582-4587 (1995), the contents of each of which are herein incorporated by |
| | | | | reference in its entirety. Exemplary human T cells, such as the SUPT cell line, that may be used |
| | | | | according to these assays are publicly available (e.g., through the ATCC). |
| 28 | HCWKC15 | 327 | Activation of | Assays for the activation of transcription through the Nuclear Factor of Activated T cells (NFAT) |
| | | | transcription | response element are well-known in the art and may be used or routinely modified to assess the ability of |
| | | | through NFAT | polypeptides of the invention (including antibodies and agonists or antagonists of the invention) to |
| | | | response | regulate NFAT transcription factors and modulate expression of genes involved in immunomodulatory |
| | | | element in | functions. Exemplary assays for transcription through the NFAT response element that may be used or |
| | | | immune cells | routinely modified to test NFAT-response element activity of polypeptides of the invention (including |
| | | | (such as T- | antibodies and agonists or antagonists of the invention) include assays disclosed in Berger et al., Gene |
| | | | cells). | 66: 1-10 (1998); Cullen and Malm, Methods in Enzymol 216: 362-368 (1992); Henthorn et al., Proc Natl |
| | | | | Acad Sci USA 85: 6342-6346 (1988); Serfling et al., Biochim Biophys Acta 1498(1): 1-18 (2000); De |
| | | | | Boer et al., Int J Biochem Cell Biol 31(10): 1221-1236 (1999); Fraser et al., Eur J Immunol 29(3): 838-844 |
| | | | | (1999); and Yeseen et al., J Biol Chem 268(19): 14285-14293 (1993), the contents of each of which are |
| | | | | herein incorporated by reference in its entirety. T cells that may be used according to these assays are |
| | | | | publicly available (e.g., through the ATCC). Exemplary human T cells that may be used according to |
| | | | | these assays include the SUPT cell line, which is a suspension culture of IL-2 and IL-4 responsive T |
| | | | | cells. |
| 28 | HCWKC15 | 327 | Activation of | Assays for the activation of transcription through the NFKB response element are well-known in the art |
| | | | transcription | and may be used or routinely modified to assess the ability of polypeptides of the invention (including |
| | | | through NFKB | antibodies and agonists or antagonists of the invention) to regulate NFKB transcription factors and |
| | | | response | modulate expression of immunomodulatory genes. Exemplary assays for transcription through the |
| | | | element in | NFKB response element that may be used or rountinely modified to test NFKB-response element activity |
| | | | immune cells | of polypeptides of the invention (including antibodies and agonists or antagonists of the invention) |
| | | | (such as T- | include assays disclosed in Berger et al., Gene 66: 1-10 (1998); Cullen and Malm, Methods in Enzymol |
| | | | cells). | 216: 362-368 (1992); Henthorn et al., Proc Natl Acad Sci USA 85: 6342-6346 (1988); Black et al., Virus |
| | | | | Gnes 15(2): 105-117 (1997); and Fraser et al., 29(3): 838-844 (1999), the contents of each of which are |
| | | | | herein incorporated by reference in its entirety. T cells that may be used according to these assays are |
| | | | | publicly available (e.g., through the ATCC). Exemplary human T cells that may be used according to |
| | | | | these assays include the SUPT cell line, which is a suspension culture of IL-2 and IL-4 responsive T |
| | | | | cells. |
| 28 | HCWKC15 | 327 | Activation of | Assays for the activation of transcription through the Nuclear Factor of Activated T cells (NFAT) |
| | | | transcription | response element are well-known in the art and may be used or routinely modified to assess the ability of |
| | | | through NFAT | polypeptides of the invention (including antibodies and agonists or antagonists of the invention) to |
| | | | response | regulate NFAT transcription factors and modulate expression of genes involved in immunomodulatory |
| | | | element in | functions. Exemplary assays for transcription through the NFAT response element that may be used or |
| | | | immune cells | routinely modified to test NFAT-response element activity of polypeptides of the invention (including |
| | | | (such as natural | antibodies and agonists or antagonists of the invention) include assays disclosed in Berger et al., Gene |
| | | | killer cells). | 66: 1-10 (1998); Cullen and Malm, Methods in Enzymol 216: 362-368 (1992); Henthorn et al., Proc Natl |
| | | | | Acad Sci USA 85: 6342-6346 (1988); Aramburu et al., J Exp Med 182(3): 801-810 (1995); De Boer et al., |
| | | | | Int J Biochem Cell Biol 31(10): 1221-1236 (1999); Fraser et al., Eur J Immunol 29(3): 838-844 (1999); |
| | | | | and Yeseen et al., J Biol Chem 268(19): 14285-14293 (1993), the contents of each of which are herein |
| | | | | incorporated by reference in its entirety. NK cells that may be used according to these assays are |
| | | | | publicly available (e.g., through the ATCC). Exemplary human NK cells that may be used according to |
| | | | | these assays include the NK-YT cell line, which is a human natural killer cell line with cytolytic and |
| | | | | cytotoxic activity. |
| 28 | HCWKC15 | 327 | Activation of | Assays for the activation of transcription through the Serum Response Element (SRE) are well-known in |
| | | | transcription | the art and may be used or routinely modified to assess the ability of polypeptides of the invention |
| | | | through serum | (including antibodies and agonists or antagonists of the invention) to regulate serum response factors and |
| | | | response | modulate the expression of genes involved in growth and upregulate the function of growth-related genes |
| | | | element in | in many cell types. Exemplary assays for transcription through the SRE that may be used or routinely |
| | | | immune cells | modified to test SRE activity of the polypeptides of the invention (including antibodies and agonists or |
| | | | (such as natural | antagonists of the invention) include assays disclosed in Berger et al., Gene 66: 1-10 (1998); Cullen and |
| | | | killer cells). | Malm, Methods in Enzymol 216: 362-368 (1992); Henthorn et al., Proc Natl Acad Sci USA 85: 6342-6346 |
| | | | | (1988); Benson et al., J Immunol 153(9): 3862-3873 (1994); and Black et al., Virus Genes 12(2): 105-117 |
| | | | | (1997), the content of each of which are herein incorporated by reference in its entirety. T cells that may |
| | | | | be used according to these assays are publicly available (e.g., through the ATCC). Exemplary T cells |
| | | | | that may be used according to these assays include the NK-YT cell line, which is a human natural killer |
| | | | | cell line with cytolytic and cytotoxic activity. |
| 29 | HDHEB60 | 328 | Activation of | Assays for the activation of transcription through the cAMP response element are well-known in the art |
| | | | transcription | and may be used or routinely modified to assess the ability of polypeptides of the invention (including |
| | | | through cAMP | antibodies and agonists or antagonists of the invention) to increase cAMP, regulate CREB transcription |
| | | | response | factors, and modulate expression of genes involved in a wide variety of cell functions. For example, a |
| | | | element (CRE) | 3T3-L1/CRE reporter assay may be used to identify factors that activate the cAMP signaling pathway. |
| | | | in pre- | CREB plays a major role in adipogenesis, and is involved in differentiation into adipocytes. CRE |
| | | | adipocytes. | contains the binding sequence for the transcription factor CREB (CRE binding protein). Exemplary |
| | | | | assays for transcription through the cAMP response element that may be used or routinely modified to |
| | | | | test cAMP-response element activity of polypeptides of the invention (including antibodies and agonists |
| | | | | or antagonists of the invention) include assays disclosed in Berger et al., Gene 66: 1-10 (1998); Cullen |
| | | | | and Malm, Methods in Enzymol 216: 362-368 (1992); Henthorn et al., Proc Natl Acad Sci USA 85: 6342-6346 |
| | | | | (1988); Reusch et al., Mol Cell Biol 20(3): 1008-1020 (2000); and Klemm et al., J Biol Chem |
| | | | | 273: 917-923 (1998), the contents of each of which are herein incorporated by reference in its entirety. |
| | | | | Pre-adipocytes that may be used according to these assays are publicly available (e.g., through the |
| | | | | ATCC) and/or may be routinely generated. Exemplary mouse adipocyte cells that may be used according |
| | | | | to these assays include 3T3-L1 cells. 3T3-L1 is an adherent mouse preadipocyte cell line that is a |
| | | | | continuous substrain of 3T3 fibroblast cells developed through clonal isolation and undergo a pre- |
| | | | | adipocyte to adipose-like conversion under appropriate differentiation conditions known in the art. |
| 29 | HDHEB60 | 328 | Myoblast cell | Assays for muscle cell proliferation are well known in the art and may be used or routinely modified to |
| | | | proliferation | assess the ability of polypeptides of the invention (including antibodies and agonists or antagonists of the |
| | | | | invention) to stimulate or inhibit myoblast cell proliferation. Exemplary assays for myoblast cell |
| | | | | proliferation that may be used or routinely modified to test activity of polypeptides and antibodies of the |
| | | | | invention (including agonists or antagonists of the invention) include, for example, assays disclosed in: |
| | | | | Soeta, C., et al. “Possible role for the c-ski gene in the proliferation of myogenic cells in regenerating |
| | | | | skeletal muscles of rats” Dev Growth Differ Apr; 43(2): 155-64 (2001); Ewton DZ, et al., “IGF binding |
| | | | | proteins-4, -5 and -6 may play specialized roles during L6 myoblast proliferation and differentiation” J |
| | | | | Endocrinol Mar; 144(3): 539-53 (1995); and, Pampusch MS, et al., “Effect of transforming growth factor |
| | | | | beta on proliferation of L6 and embryonic porcine myogenic cells” J Cell Physiol Jun; 143(3): 524-8 |
| | | | | (1990); the contents of each of which are herein incorporated by reference in their entirety. Exemplary |
| | | | | myoblast cells that may be used according to these assays include the rat myoblast L6 cell line. Rat |
| | | | | myoblast L6 cells are an adherent rat myoblast cell line, isolated from primary cultures of rat thigh |
| | | | | muscle, that fuse to form multinucleated myotubes and striated fibers after culture in differentiation |
| | | | | media. |
| 29 | HDHEB60 | 328 | Production of | Assays for measuring expression of VCAM are well-known in the art and may be used or routinely |
| | | | VCAM in | modified to assess the ability of polypeptides of the invention (including antibodies and agonists or |
| | | | endothelial cells | antagonists of the invention) to regulate VCAM expression. For example, FMAT may be used to meaure |
| | | | (such as human | the upregulation of cell surface VCAM-1 expresssion in endothelial cells. Endothelial cells are cells that |
| | | | umbilical vein | line blood vessels, and are involved in functions that include, but are not limited to, angiogenesis, |
| | | | endothelial cells | vascular permeability, vascular tone, and immune cell extravasation. Exemplary endothelial cells that |
| | | | (HUVEC)) | may be used according to these assays include human umbilical vein endothelial cells (HUVEC), which |
| | | | | are available from commercial sources. The expression of VCAM (CD106), a membrane-associated |
| | | | | protein, can be upregulated by cytokines or other factors, and contributes to the extravasation of |
| | | | | lymphocytes, leucocytes and other immune cells from blood vessels; thus VCAM expression plays a role |
| | | | | in promoting immune and inflammatory responses. |
| 29 | HDHEB60 | 328 | Activation of | Assays for the activation of transcription through the Signal Transducers and Activators of Transcription |
| | | | transcription | (STAT6) response element are well-known in the art and may be used or routinely modified to assess the |
| | | | through STAT6 | ability of polypeptides of the invention (including antibodies and agonists or antagonists of the invention) |
| | | | response | to regulate STAT6 transcription factors and modulate the expression of multiple genes. Exemplary |
| | | | element in | assays for transcription through the STAT6 response element that may be used or routinely modified to |
| | | | immune cells | test STAT6 response element activity of the polypeptides of the invention (including antibodies and |
| | | | (such as natural | agonists or antagonists of the invention) include assays disclosed in Berger et al., Gene 66: 1-10 (1998); |
| | | | killer cells). | Cullen and Malm, Methods in Euzymol 216: 362-368 (1992); Henthorn et al., Proc Natl Acad Sci USA |
| | | | | 85: 6342-6346 (1988); Georas et al., Blood 92(12): 4529-4538 (1998); Moffatt et al., Transplantation |
| | | | | 69(7): 1521-1523 (2000); Curiel et al., Eur J Immunol 27(8): 1982-1987 (1997); and Masuda et al., J Biol |
| | | | | Chem 275(38): 29331-29337 (2000), the contents of each of which are herein incorporated by reference in |
| | | | | its entirety. T cells that may be used according to these assays are publicly available (e.g., through the |
| | | | | ATCC). Exemplary rat natural killer cells that may be used according to these assays are publicly |
| | | | | available (e.g., through the ATCC). |
| 29 | HDHEB60 | 328 | Activation of | Assays for the activation of transcription through the AP1 response element are well-known in the art and |
| | | | transcription | may be used or routinely modified to assess the ability of polypeptides of the invention (including |
| | | | through AP1 | antibodies and agonists or antagonists of the invention) to modulate growth and other cell functions. |
| | | | response | Exemplary assays for transcription through the AP1 response element that may be used or routinely |
| | | | element in | modified to test AP1-response element activity of polypeptides of the invention (including antibodies and |
| | | | immune cells | agonists or antagonists of the invention) include assays disclosed in Berger et al., Gene 66: 1-10 (1988); |
| | | | (such as T- | Cullen and Malm, Methods in Enzymol 216: 362-368 (1992); Henthorn et al., Proc Natl Acad Sci USA |
| | | | cells). | 85: 6342-6346 (1988); Rellahan et al., J Biol Chem 272(49): 30806-30811 (1997); Chang et al., Mol Cell |
| | | | | Biol 18(9): 4986-4993 (1998); and Fraser et al., Eur J Immunol 29(3): 838-844 (1999), the contents of |
| | | | | each of which are herein incorporated by reference in its entirety. Human T cells that may be used |
| | | | | according to these assays are publicly available (e.g., through the ATCC). Exemplary human T cells that |
| | | | | may be used according to these assays include the SUPT cell line, which is an IL-2 and IL-4 responsive |
| | | | | suspension-culture cell line. |
| 29 | HDHEB60 | 328 | Activation of | Assays for the activation of transcription through the CD28 response element are well-known in the art |
| | | | transcription | and may be used or routinely modified to assess the ability of polypeptides of the invention (including |
| | | | through CD28 | antibodies and agonists or antagonists of the invention) to stimulate IL-2 expression in T cells. |
| | | | response | Exemplary assays for transcription through the CD28 response element that may be used or routinely |
| | | | element in | modified to test CD28-response element activity of polypeptides of the invention (including antibodies |
| | | | immune cells | and agonists or antagonists of the invention) include assays disclosed in Berger et al., Gene 66: 1-10 |
| | | | (such as T- | (1998); Cullen and Malm, Methods in Enzymol 216: 362-368 (1992); Henthorn et al., Proc Natl Acad Sci |
| | | | cells). | USA 85: 6342-6346 (1988); McGuire and Iacobelli, J Immunol 159(3): 1319-1327 (1997); Parra et al., J |
| | | | | Immunol 166(4): 2437-2443 (2001); and Butscher et al., J Biol Chem 3(1): 552-560 (1998), the contents |
| | | | | of each of which are herein incorporated by reference in its entirety. T cells that may be used according |
| | | | | to these assays are publicly available (e.g., through the ATCC). Exemplary human T cells that may be |
| | | | | used according to these assays include the SUPT cell line, which is a suspension culture of IL-2 and IL-4 |
| | | | | responsive T cells. |
| 29 | HDHEB60 | 328 | Activation of | Assays for the activation of transcription through the Gamma Interferon Activation Site (GAS) response |
| | | | transcription | element are well-known in the art and may be used or routinely modified to assess the ability of |
| | | | through GAS | polypeptides of the invention (including antibodies and agonists or antagonists of the invention) to |
| | | | response | regulate STAT transcription factors and modulate gene expression involved in a wide variety of cell |
| | | | element in | functions. Exemplary assays for transcription through the GAS response element that may be used or |
| | | | immune cells | routinely modified to test GAS-response element activity of polypeptides of the invention (including |
| | | | (such as T- | antibodies and agonists or antagonists of the invention) include assays disclosed in Berger et al., Gene |
| | | | cells). | 66: 1-10 (1998); Cullen and Malm, Methods in Enzymol 216: 362-368 (1992); Henthorn et al., Proc Natl |
| | | | | Acad Sci USA 85: 6342-6346 (1988); Matikainen et al., Blood 93(6): 1980-1991 (1999); and Henttinen et |
| | | | | al., J Immunol 155(10): 4582-4587 (1995), the contents of each of which are herein incorporated by |
| | | | | reference in its entirety. Exemplary human T cells, such as the SUPT cell line, that may be used |
| | | | | according to these assays are publicly available (e.g., through the ATCC). |
| 29 | HDHEB60 | 328 | Activation of | Assays for the activation of transcription through the Nuclear Factor of Activated T cells (NFAT) |
| | | | transcription | response element are well-known in the art and may be used or routinely modified to assess the ability of |
| | | | through NFAT | polypeptides of the invention (including antibodies and agonists or antagonists of the invention) to |
| | | | response | regulate NFAT transcription factors and modulate expression of genes involved in immunomodulatory |
| | | | element in | functions. Exemplary assays for transcription through the NFAT response element that may be used or |
| | | | immune cells | routinely modified to test NFAT-response element activity of polypeptides of the invention (including |
| | | | (such as T- | antibodies and agonists or antagonists of the invention) include assays disclosed in Berger et al., Gene |
| | | | cells). | 66: 1-10 (1998); Cullen and Malm, Methods in Enzymol 216: 362-368 (1992); Henthorn et al., Proc Natl |
| | | | | Acad Sci USA 85: 6342-6346 (1988); Serfling et al., Biochim Biophys Acta 1498(1): 1-18 (2000); De |
| | | | | Boer et al., Int J Biochem Cell Biol 31(10): 1221-1236 (1999); Fraser et al., Eur J Immunol 29(3): 838-844 |
| | | | | (1999); and Yeseen et al., J Biol Chem 268(19): 14285-14293 (1993), the contents of each of which are |
| | | | | herein incorporated by reference in its entirety. T cells that may be used according to these assays are |
| | | | | publicly available (e.g., through the ATCC). Exemplary human T cells that may be used according to |
| | | | | these assays include the SUPT cell line, which is a suspension culture of IL-2 and IL-4 responsive T |
| | | | | cells. |
| 29 | HDHEB60 | 328 | Activation of | Assays for the activation of transcription through the Signal Transducers and Activators of Transcription |
| | | | transcription | (STAT6) response element are well-known in the art and may be used or routinely modified to assess the |
| | | | through STAT6 | ability of polypeptides of the invention (including antibodies and agonists or antagonists of the invention) |
| | | | response | to regulate STAT6 transcription factors and modulate the expression of multiple genes. Exemplary |
| | | | element in | assays for transcription through the STAT6 response element that may be used or routinely modified to |
| | | | immune cells | test STAT6 response element activity of the polypeptides of the invention (including antibodies and |
| | | | (such as T- | agonists or antagonists of the invention) include assays disclosed in Berger et al., Gene 66: 1-10 (1998); |
| | | | cells). | Cullen and Malm, Methods in Enzymol 216: 362-368 (1992); Henthorn et al., Proc Natl Acad Sci USA |
| | | | | 85: 6342-6346 (1988); Georas et al., Blood 92(12): 4529-4538 (1998); Moffatt et al., Transplantation |
| | | | | 69(7): 1521-1523 (2000); Curiel et al., Eur J Immunol 27(8): 1982-1987 (1997); and Masuda et al., J Biol |
| | | | | Chem 275(38): 29331-29337 (2000), the contents of each of which are herein incorporated by reference in |
| | | | | its entirety. T cells that may be used according to these assays are publicly available (e.g., through the |
| | | | | ATCC). Exemplary T cells that may be used according to these assays include the SUPT cell line, which |
| | | | | is a suspension culture of IL-2 and IL-4 responsive T cells. |
| 29 | HDHEB60 | 328 | Activation of | Assays for the activation of transcription through the NFKB response element are well-known in the art |
| | | | transcription | and may be used or routinely modified to assess the ability of polypeptides of the invention (including |
| | | | through NFKB | antibodies and agonists or antagonists of the invention) to regulate NFKB transcription factors and |
| | | | response | modulate expression of immunomodulatory genes. Exemplary assays for transcription through the |
| | | | element in | NFKB response element that may be used or rountinely modified to test NFKB-response element activity |
| | | | immune cells | of polypeptides of the invention (including antibodies and agonists or antagonists of the invention) |
| | | | (such as T- | include assays disclosed in Berger et al., Gene 66: 1-10 (1998); Cullen and Malm, Methods in Enzymol |
| | | | cells). | 216: 362-368 (1992); Henthorn et al., Proc Natl Acad Sci USA 85: 6342-6346 (1988); Black et al., Virus |
| | | | | Gnes 15(2): 105-117 (1997); and Fraser et al., 29(3): 838-844 (1999), the contents of each of which are |
| | | | | herein incorporated by reference in its entirety. T cells that may be used according to these assays are |
| | | | | publicly available (e.g., through the ATCC). Exemplary human T cells that may be used according to |
| | | | | these assays include the SUPT cell line, which is a suspension culture of IL-2 and IL-4 responsive T |
| | | | | cells. |
| 29 | HDHEB60 | 328 | Activation of | Assays for the activation of transcription through the Nuclear Factor of Activated T cells (NFAT) |
| | | | transcription | response element are well-known in the art and may be used or routinely modified to assess the ability of |
| | | | through NFAT | polypeptides of the invention (including antibodies and agonists or antagonists of the invention) to |
| | | | response | regulate NFAT transcription factors and modulate expression of genes involved in immunomodulatory |
| | | | element in | functions. Exemplary assays for transcription through the NFAT response element that may be used or |
| | | | immune cells | routinely modified to test NFAT-response element activity of polypeptides of the invention (including |
| | | | (such as natural | antibodies and agonists or antagonists of the invention) include assays disclosed in Berger et al., Gene |
| | | | killer cells). | 66: 1-10 (1998); Cullen and Malm, Methods in Enzymol 216: 362-368 (1992); Henthorn et al., Proc Natl |
| | | | | Acad Sci USA 85: 6342-6346 (1988); Aramburu et al., J Exp Med 182(3): 801-810 (1995); De Boer et al., |
| | | | | Int J Biochem Cell Biol 31(10): 1221-1236 (1999); Fraser et al., Eur J Immunol 29(3): 838-844 (1999); |
| | | | | and Yeseen et al., J Biol Chem 268(19): 14285-14293 (1993), the contents of each of which are herein |
| | | | | incorporated by reference in its entirety. NK cells that may be used according to these assays are |
| | | | | publicly available (e.g., through the ATCC). Exemplary human NK cells that may be used according to |
| | | | | these assays include the NK-YT cell line, which is a human natural killer cell line with cytolytic and |
| | | | | cytotoxic activity. |
| 30 | HDPBA28 | 329 | Stimulation of | Assays for measuring secretion of insulin are well-known in the art and may be used or routinely |
| | | | insulin secretion | modified to assess the ability of polypeptides of the invention (including antibodies and agonists or |
| | | | from pancreatic | antagonists of the invention) to stimulate insulin secretion. For example, insulin secretion is measured by |
| | | | beta cells. | FMAT using anti-rat insulin antibodies. Insulin secretion from pancreatic beta cells is upregulated by |
| | | | | glucose and also by certain proteins/peptides, and disregulation is a key component in diabetes. |
| | | | | Exemplary assays that may be used or routinely modified to test for stimulation of insulin secretion (from |
| | | | | pancreatic cells) by polypeptides of the invention (including antibodies and agonists or antagonists of the |
| | | | | invention) include assays disclosed in: Ahren, B., et al., Am J Physiol, 277(4 Pt 2): R959-66 (1999); Li, M., |
| | | | | et al., Endocrinology, 138(9): 3735-40 (1997); Kim, K. H., et al., FEBS Lett, 377(2): 237-9 (1995); |
| | | | | and, Miraglia S et. al., Journal of Biomolecular Screening, 4: 193-204 (1999), the contents of each of |
| | | | | which is herein incorporated by reference in its entirety. Pancreatic cells that may be used according to |
| | | | | these assays are publicly available (e.g., through the ATCC) and/or may be routinely generated. |
| | | | | Exemplary pancreatic cells that may be used according to these assays include rat INS-1 cells. INS-1 |
| | | | | cells are a semi-adherent cell line established from cells isolated from an X-ray induced rat transplantable |
| | | | | insulinoma. These cells retain characteristics typical of native pancreatic beta cells including glucose |
| | | | | inducible insulin secretion. References: Asfari et al. Endocrinology 1992 130: 167. |
| 30 | HDPBA28 | 329 | Production of | Assays for production of IL-10 and activation of T-cells are well known in the art and may be used or |
| | | | IL-10 and | routinely modified to assess the ability of polypeptides of the invention (including antibodies and |
| | | | activation of T- | agonists or antagonists of the invention) to stimulate or inhibit production of IL-10 and/or activation of |
| | | | cells. | T-cells. Exemplary assays that may be used or routinely modified to assess the ability of polypeptides |
| | | | | and antibodies of the invention (including agonists or antagonists of the invention) to modulate IL-10 |
| | | | | production and/or T-cell proliferation include, for example, assays such as disclosed and/or cited in: |
| | | | | Robinson, DS, et al., “Th-2 cytokines in allergic disease” Br Med Bull; 56 (4): 956-968 (2000), and |
| | | | | Cohn, et al., “T-helper type 2 cell-directed therapy for asthma” Pharmacology & Therapeutics; 88: 187-196 |
| | | | | (2000); the contents of each of which are herein incorporated by reference in their entirety. |
| | | | | Exemplary cells that may be used according to these assays include Th2 cells. IL10 secreted from Th2 |
| | | | | cells may be measured as a marker of Th2 cell activation. Th2 cells are a class of T cells that secrete |
| | | | | IL4, IL10, IL13, IL5 and IL6. Factors that induce differentiation and activation of Th2 cells play a |
| | | | | major role in the initiation and pathogenesis of allergy and asthma. Primary T helper 2 cells are |
| | | | | generated via in vitro culture under Th2 polarizing conditions using peripheral blood lymphocytes |
| | | | | isolated from cord blood. |
| 31 | HDPCL63 | 330 | Regulation of | Assays for the regulation of transcription through the FAS promoter element are well-known in the art |
| | | | transcription | and may be used or routinely modified to assess the ability of polypeptides of the invention (including |
| | | | through the FAS | antibodies and agonists or antagonists of the invention) to activate the FAS promoter element in a |
| | | | promoter | reporter construct and to regulate transcription of FAS, a key enzyme for lipogenesis. FAS promoter is |
| | | | element in | regulated by many transcription factors including SREBP. Insulin increases FAS gene transcription in |
| | | | hepatocytes | livers of diabetic mice. This stimulation of transcription is also somewhat glucose dependent. |
| | | | | Exemplary assays that may be used or routinely modified to test for FAS promoter element activity (in |
| | | | | hepatocytes) by polypeptides of the invention (including antibodies and agonists or antagonists of the |
| | | | | invention) include assays disclosed in Xiong, S., et al., Proc Natl Acad Sci U.S.A., 97(8): 3948-53 (2000); |
| | | | | Roder, K., et al., Eur J Biochem, 260(3): 743-51 (1999); Oskouian B, et al., Biochem J, 317 (Pt 1): 257-65 |
| | | | | (1996); Berger, et al., Gene 66: 1-10 (1988); and, Cullen, B., et al., Methods in Enzymol. 216: 362-368 |
| | | | | (1992), the contents of each of which is herein incorporated by reference in its entirety. Hepatocytes that |
| | | | | may be used according to these assays, such as H4IIE cells, are publicly available (e.g., through the |
| | | | | ATCC) and/or may be routinely generated. Exemplary hepatocytes that may be used according to these |
| | | | | assays include rat liver hepatoma cell line(s) inducible with glucocorticoids, insulin, or cAMP |
| | | | | derivatives. |
| 32 | HDPCO25 | 331 | Regulation of | Assays for the regulation of viability and proliferation of cells in vitro are well-known in the art and may |
| | | | viability and | be used or routinely modified to assess the ability of polypeptides of the invention (including antibodies |
| | | | proliferation of | and agonists or antagonists of the invention) to regulate viability and proliferation of pancreatic beta |
| | | | pancreatic beta | cells. For example, the Cell Titer-Glo luminescent cell viability assay measures the number of viable |
| | | | cells. | cells in culture based on quantitation of the ATP present which signals the presence of metabolically |
| | | | | active cells. Exemplary assays that may be used or routinely modified to test regulation of viability and |
| | | | | proliferation of pancreatic beta cells by polypeptides of the invention (including antibodies and agonists |
| | | | | or antagonists of the invention) include assays disclosed in: Ohtani KI, et al., Endocrinology, 139(1): 172-8 |
| | | | | (1998); Krautheim A, et al, Exp Clin Endocrinol Diabetes, 107 (1): 29-34 (1999), the contents of each |
| | | | | of which is herein incorporated by reference in its entirety. Pancreatic cells that may be used according |
| | | | | to these assays are publicly available (e.g., through the ATCC) and/or may be routinely generated. |
| | | | | Exemplary pancreatic cells that may be used according to these assays include HITT15 Cells. HITT15 |
| | | | | are an adherent epithelial cell line established from Syrian hamster islet cells transformed with SV40. |
| | | | | These cells express glucagon, somatostatin, and glucocorticoid receptors. The cells secrete insulin, |
| | | | | which is stimulated by glucose and glucagon and suppressed by somatostatin or glucocorticoids. ATTC# |
| | | | | CRL-1777 Refs: Lord and Ashcroft. Biochem. J. 219: 547-551; Santerre et al. Proc. Natl. Acad. Sci. |
| | | | | USA 78: 4339-4343, 1981. |
| 32 | HDPCO25 | 331 | Activation of | Assays for the activation of transcription through the NFKB response element are well-known in the art |
| | | | transcription | and may be used or routinely modified to assess the ability of polypeptides of the invention (including |
| | | | through NFKB | antibodies and agonists or antagonists of the invention) to regulate NFKB transcription factors and |
| | | | response | modulate expression of immunomodulatory genes. Exemplary assays for transcription through the |
| | | | element in | NFKB response element that may be used or rountinely modified to test NFKB-response element activity |
| | | | immune cells | of polypeptides of the invention (including antibodies and agonists or antagonists of the invention) |
| | | | (such as T- | include assays disclosed in Berger et al., Gene 66: 1-10 (1998); Cullen and Malm, Methods in Enzymol |
| | | | cells). | 216: 362-368 (1992); Henthorn et al., Proc Natl Acad Sci USA 85: 6342-6346 (1988); Black et al, Virus |
| | | | | Gnes 15(2): 105-117 (1997); and Fraser et al., 29(3): 838-844 (1999), the contents of each of which are |
| | | | | herein incorporated by reference in its entirety. T cells that may be used according to these assays are |
| | | | | publicly available (e.g., through the ATCC). Exemplary human T cells that may be used according to |
| | | | | these assays include the SUPT cell line, which is a suspension culture of IL-2 and IL-4 responsive T |
| | | | | cells. |
| 33 | HDPFP29 | 332 | Myoblast cell | Assays for muscle cell proliferation are well known in the art and may be used or routinely modified to |
| | | | proliferation | assess the ability of polypeptides of the invention (including antibodies and agonists or antagonists of the |
| | | | | invention) to stimulate or inhibit myoblast cell proliferation. Exemplary assays for myoblast cell |
| | | | | proliferation that may be used or routinely modified to test activity of polypeptides and antibodies of the |
| | | | | invention (including agonists or antagonists of the invention) include, for example, assays disclosed in: |
| | | | | Soeta, C., et al. “Possible role for the c-ski gene in the proliferation of myogenic cells in regenerating |
| | | | | skeletal muscles of rats” Dev Growth Differ Apr; 43(2): 155-64 (2001); Ewton DZ, et at, “IGF binding |
| | | | | proteins-4, -5 and -6 may play specialized roles during L6 myoblast proliferation and differentiation” J |
| | | | | Endocrinol Mar; 144(3): 539-53 (1995); and, Pampusch MS, et al., “Effect of transforming growth factor |
| | | | | beta on proliferation of L6 and embryonic porcine myogenic cells” J Cell Physiol Jun;143(3): 524-8 |
| | | | | (1990); the contents of each of which are herein incorporated by reference in their entirety. Exemplary |
| | | | | myoblast cells that may be used according to these assays include the rat myoblast L6 cell line. Rat |
| | | | | myoblast L6 cells are an adherent rat myoblast cell line, isolated from primary cultures of rat thigh |
| | | | | muscle, that fuse to form multinucleated myotubes and striated fibers after culture in differentiation |
| | | | | media. |
| 34 | HDPGT01 | 333 | Regulation of | Assays for the regulation of transcription through the FAS promoter element are well-known in the art |
| | | | transcription | and may be used or routinely modified to assess the ability of polypeptides of the invention (including |
| | | | through the FAS | antibodies and agonists or antagonists of the invention) to activate the FAS promoter element in a |
| | | | promoter | reporter construct and to regulate transcription of FAS, a key enzyme for lipogenesis. FAS promoter is |
| | | | element in | regulated by many transcription factors including SREBP. Insulin increases FAS gene transcription in |
| | | | hepatocytes | livers of diabetic mice. This stimulation of transcription is also somewhat glucose dependent. |
| | | | | Exemplary assays that may be used or routinely modified to test for FAS promoter element activity (in |
| | | | | hepatocytes) by polypeptides of the invention (including antibodies and agonists or antagonists of the |
| | | | | invention) include assays disclosed in Xiong, S., et al., Proc Natl Acad Sci U.S.A., 97(8): 3948-53(2000); |
| | | | | Roder, K., et al., Eur J Biochem, 260(3): 743-51 (1999); Oskouian B, et al., Biochem J, 317 (Pt 1): 257-65 |
| | | | | (1996); Berger, et al., Gene 66: 1-10 (1988); and, Cullen, B., et al., Methods in Enzymol. 216: 362-368 |
| | | | | (1992), the contents of each of which is herein incorporated by reference in its entirety. Hepatocytes that |
| | | | | may be used according to these assays, such as H4IIE cells, are publicly available (e.g., through the |
| | | | | ATCC) and/or may be routinely generated. Exemplary hepatocytes that may be used according to these |
| | | | | assays include rat liver hepatoma cell line(s) inducible with glucocorticoids, insulin, or cAMP |
| | | | | derivatives. |
| 35 | HDPHI51 | 334 | Regulation of | Assays for the regulation of transcription through the FAS promoter element are well-known in the art |
| | | | transcription | and may be used or routinely modified to assess the ability of polypeptides of the invention (including |
| | | | through the FAS | antibodies and agonists or antagonists of the invention) to activate the FAS promoter element in a |
| | | | promoter | reporter construct and to regulate transcription of FAS, a key enzyme for lipogenesis. FAS promoter is |
| | | | element in | regulated by many transcription factors including SREBP. Insulin increases FAS gene transcription in |
| | | | hepatocytes | livers of diabetic mice. This stimulation of transcription is also somewhat glucose dependent. |
| | | | | Exemplary assays that may be used or routinely modified to test for FAS promoter element activity (in |
| | | | | hepatocytes) by polypeptides of the invention (including antibodies and agonists or antagonists of the |
| | | | | invention) include assays disclosed in Xiong, S., et al., Proc Natl Acad Sci U.S.A., 97(8): 3948-53 (2000); |
| | | | | Roder, K., et al, Eur J Biochem, 260(3): 743-51(1999); Oskouian B, et al., Biochem J, 317 (Pt 1): 257-65 |
| | | | | (1996); Berger, et al., Gene 66: 1-10 (1988); and, Cullen, B., et al., Methods in Enzymol. 216: 362-368 |
| | | | | (1992), the contents of each of which is herein incorporated by reference in its entirety. Hepatocytes that |
| | | | | may be used according to these assays, such as H4IIE cells, are publicly available (e.g., through the |
| | | | | ATCC) and/or may be routinely generated. Exemplary hepatocytes that may be used according to these |
| | | | | assays include rat liver hepatoma cell line(s) inducible with glucocorticoids, insulin, or cAMP |
| | | | | derivatives. |
| 35 | HDPHI51 | 334 | Activation of | Assays for the activation of transcription through the Signal Transducers and Activators of Transcription |
| | | | transcription | (STAT6) response element are well-known in the art and may be used or routinely modified to assess the |
| | | | through STAT6 | ability of polypeptides of the invention (including antibodies and agonists or antagonists of the invention). |
| | | | response | to regulate STAT6 transcription factors and modulate the expression of multiple genes. Exemplary |
| | | | element in | assays for transcription through the STAT6 response element that may be used or routinely modified to |
| | | | immune cells | test STAT6 response element activity of the polypeptides of the invention (including antibodies and |
| | | | (such as T- | agonists or antagonists of the invention) include assays disclosed in Berger et al., Gene 66: 1-10(1998); |
| | | | cells). | Cullen and Malm, Methods in Enzymol 216: 362-368 (1992); Henthorn et al., Proc Natl Acad Sci USA |
| | | | | 85: 6342-6346 (1988); Georas et al., Blood 92(12): 4529-4538 (1998); Moffatt et al., Transplantation |
| | | | | 69(7): 1521-1523 (2000); Curiel et al., Eur J Immunol 27(8): 1982-1987 (1997); and Masuda et al., J Biol |
| | | | | Chem 275(38): 29331-29337 (2000), the contents of each of which are herein incorporated by reference in |
| | | | | its entirety. T cells that may be used according to these assays are publicly available (e.g., through the |
| | | | | ATCC). Exemplary T cells that may be used according to these assays include the SUPT cell line, which |
| | | | | is a suspension culture of IL-2 and IL-4 responsive T cells. |
| 36 | HDPJM30 | 335 | Production of | MCP-1 FMAT. Assays for immunomodulatory proteins that are produced by a large variety of cells and |
| | | | MCP-1 | act to induce chemotaxis and activation of monocytes and T cells are well known in the art and may be |
| | | | | used or routinely modified to assess the ability of polypeptides of the invention (including antibodies and |
| | | | | agonists or antagonists of the invention) to mediate immunomodulation, induce chemotaxis, and |
| | | | | modulate immune cell activation. Exemplary assays that test for immunomodulatory proteins evaluate |
| | | | | the production of cell surface markers, such as monocyte chemoattractant protein (MCP), and the |
| | | | | activation of monocytes and T cells. Such assays that may be used or routinely modified to test |
| | | | | immunomodulatory and diffferentiation activity of polypeptides of the invention (including antibodies |
| | | | | and agonists or antagonists of the invention) include assays disclosed in Miraglia et al., J Biomolecular |
| | | | | Screening 4: 193-204(1999); Rowland et al., “Lymphocytes: a practical approach” Chapter 6: 138-160 |
| | | | | (2000); Satthaporn and Eremin, J R Coll Surg Ednb 45(1): 9-19 (2001); and Verhasselt et al., J Immunol |
| | | | | 158: 2919-2925 (1997), the contents of each of which are herein incorporated by reference in its entirety. |
| | | | | Human dendritic cells that may be used according to these assays may be isolated using techniques |
| | | | | disclosed herein or otherwise known in the art. Human dendritic cells are antigen presenting cells in |
| | | | | suspension culture, which, when activated by antigen and/or cytokines, initiate and upregulate T cell |
| | | | | proliferation and functional activities. |
| 36 | HDPJM30 | 335 | Regulation of | Assays for the regulation of transcription through the FAS promoter element are well-known in the art |
| | | | transcription | and may be used or routinely modified to assess the ability of polypeptides of the invention (including |
| | | | through the FAS | antibodies and agonists or antagonists of the invention) to activate the FAS promoter element in a |
| | | | promoter | reporter construct and to regulate transcription of FAS, a key enzyme for lipogenesis. FAS promoter is |
| | | | element in | regulated by many transcription factors including SREBP. Insulin increases FAS gene transcription in |
| | | | hepatocytes | livers of diabetic mice. This stimulation of transcription is also somewhat glucose dependent. |
| | | | | Exemplary assays that may be used or routinely modified to test for FAS promoter element activity (in |
| | | | | hepatocytes) by polypeptides of the invention (including antibodies and agonists or antagonists of the |
| | | | | invention) include assays disclosed in Xiong, S., et al., Proc Natl Acad Sci U.S.A., 97(8): 3948-53 (2000); |
| | | | | Roder, K., et al., Eur J Biochem, 260(3): 743-51 (1999); Oskouian B, et al., Biochem J, 317 (Pt 1): 257-65 |
| | | | | (1996); Berger, et al., Gene 66: 1-10 (1988); and, Cullen, B., et al., Methods in Enzymol. 216: 362-368 |
| | | | | (1992), the contents of each of which is herein incorporated by reference in its entirety. Hepatocytes that |
| | | | | may be used according to these assays, such as H4IIE cells, are publicly available (e.g., through the |
| | | | | ATCC) and/or may be routinely generated. Exemplary hepatocytes that may be used according to these |
| | | | | assays include rat liver hepatoma cell line(s) inducible with glucocorticoids, insulin, or cAMP |
| | | | | derivatives. |
| 37 | HDPMM88 | 336 | Myoblast cell | Assays for muscle cell proliferation are well known in the art and may be used or routinely modified to |
| | | | proliferation | assess the ability of polypeptides of the invention (including antibodies and agonists or antagonists of the |
| | | | | invention) to stimulate or inhibit myoblast cell proliferation. Exemplary assays for myoblast cell |
| | | | | proliferation that may be used or routinely modified to test activity of polypeptides and antibodies of the |
| | | | | invention (including agonists or antagonists of the invention) include, for example, assays disclosed in: |
| | | | | Soeta, C., et al. “Possible role for the c-ski gene in the proliferation of myogenic cells in regenerating |
| | | | | skeletal muscles of rats” Dev Growth Differ Apr; 43(2): 155-64 (2001); Ewton DZ, et al., “IGF binding |
| | | | | proteins-4, -5 and -6 may play specialized roles during L6 myoblast proliferation and differentiation” J |
| | | | | Endocrinol Mar; 144(3): 539-53 (1995); and, Pampusch MS, et al., ”Effect of transforming growth factor |
| | | | | beta on proliferation of L6 and embryonic porcine myogenic cells” J Cell Physiol Jun; 143(3): 524-8 |
| | | | | (1990); the contents of each of which are herein incorporated by reference in their entirety. Exemplary |
| | | | | myoblast cells that may be used according to these assays include the rat myoblast L6 cell line. Rat |
| | | | | myoblast L6 cells are an adherent rat myoblast cell line, isolated from primary cultures of rat thigh |
| | | | | muscle, that fuse to form multinucleated myotubes and striated fibers after culture in differentiation |
| | | | | media. |
| 38 | HDPOJ08 | 337 | Regulation of | Caspase Apoptosis. Assays for caspase apoptosis are well known in the art and may be used or |
| | | | apoptosis in | routinely modified to assess the ability of polypeptides of the invention (including antibodies and |
| | | | pancreatic beta | agonists or antagonists of the invention) to promote caspase protease-mediated apoptosis. Apoptosis in |
| | | | cells. | pancreatic beta is associated with induction and progression of diabetes. Exemplary assays for caspase |
| | | | | apoptosis that may be used or routinely modified to test capase apoptosis activity of polypeptides of the |
| | | | | invention (including antibodies and agonists or antagonists of the invention) include the assays disclosed |
| | | | | in: Loweth, AC, et al., FEBS Lett, 400(3): 285-8 (1997); Saini, KS, et al., Biochem Mol Biol Int, |
| | | | | 39(6): 1229-36 (1996); Krautheim, A., et al., Br J Pharmacol, 129(4): 687-94 (2000); Chandra J, et al., |
| | | | | Diabetes, 50 Suppl 1: S44-7 (2001); Suk K, et al., J Immunol, 166(7): 4481-9 (2001); Tejedo J, et al., |
| | | | | FEBS Lett, 459(2): 238-43 (1999); Zhang, S., et al., FEBS Lett, 455(3): 315-20 (1999); Lee et al., FEBS |
| | | | | Lett 485(2-3): 122-126 (2000); Nor et al., J Vasc Res 37(3): 209-218 (2000); and Karsan and Harlan, J |
| | | | | Atheroscler Thromb 3(2): 75-80 (1996); the contents of each of which are herein incorporated by |
| | | | | reference in its entirety. Pancreatic cells that may be used according to these assays are publicly |
| | | | | available (e.g., through the ATCC) and/or may be routinely generated. Exemplary pancreatic cells that |
| | | | | may be used according to these assays include RIN-m. RIN-m is a rat adherent pancreatic beta cell |
| | | | | insulinoma cell line derived from a radiation induced transplantable rat islet cell tumor. The cells |
| | | | | produce and secrete islet polypeptide hormones, and produce insulin, somatostatin, and possibly |
| | | | | glucagon. ATTC: #CRL-2057 Chick et al. Proc. Natl. Acad. Sci. 1977 74: 628; AF et al. Proc. Natl. |
| | | | | Acad. Sci. 1980 77: 3519. |
| 39 | HDPPN86 | 338 | Stimulation of | Assays for measuring secretion of insulin are well-known in the art and may be used or routinely |
| | | | insulin secretion | modified to assess the ability of polypeptides of the invention (including antibodies and agonists or |
| | | | from pancreatic | antagonists of the invention) to stimulate insulin secretion. For example, insulin secretion is measured by |
| | | | beta cells. | FMAT using anti-rat insulin antibodies. Insulin secretion from pancreatic beta cells is upregulated by |
| | | | | glucose and also by certain proteins/peptides, and disregulation is a key component in diabetes. |
| | | | | Exemplary assays that may be used or routinely modified to test for stimulation of insulin secretion (from |
| | | | | pancreatic cells) by polypeptides of the invention (including antibodies and agonists or antagonists of the |
| | | | | invention) include assays disclosed in: Ahren, B., et al., Am J Physiol, 277(4 Pt 2): R959-66 (1999); Li, M., |
| | | | | et al., Endocrinology, 138(9): 3735-40 (1997); Kim, K. H., et al., FEBS Lett, 377(2): 237-9 (1995); |
| | | | | and, Miraglia S et. al., Journal of Biomolecular Screening, 4: 193-204 (1999), the contents of each of |
| | | | | which is herein incorporated by reference in its entirety. Pancreatic cells that may be used according to |
| | | | | these assays are publicly available (e.g., through the ATCC) and/or may be routinely generated. |
| | | | | Exemplary pancreatic cells that may be used according to these assays include rat INS-1 cells. INS-1 |
| | | | | cells are a semi-adherent cell line established from cells isolated from an X-ray induced rat transplantable |
| | | | | insulinoma. These cells retain characteristics typical of native pancreatic beta cells including glucose |
| | | | | inducible insulin secretion. References: Asfari et al. Endocrinology 1992 130: 167. |
| 40 | HDPSB18 | 339 | Stimulation of | Assays for measuring secretion of insulin are well-known in the art and may be used or routinely |
| | | | insulin secretion | modified to assess the ability of polypeptides of the invention (including antibodies and agonists or |
| | | | from pancreatic | antagonists of the invention) to stimulate insulin secretion. For example, insulin secretion is measured by |
| | | | beta cells. | FMAT using anti-rat insulin antibodies. Insulin secretion from pancreatic beta cells is upregulated by |
| | | | | glucose and also by certain proteins/peptides, and disregulation is a key component in diabetes. |
| | | | | Exemplary assays that may be used or routinely modified to test for stimulation of insulin secretion (from |
| | | | | pancreatic cells) by polypeptides of the invention (including antibodies and agonists or antagonists of the |
| | | | | invention) include assays disclosed in: Ahren, B., et al., Am J Physiol, 277(4 Pt 2): R959-66 (1999); Li, M., |
| | | | | et al., Endocrinology, 138(9): 3735-40 (1997); Kim, K. H., et al., FEBS Lett, 377(2): 237-9 (1995); |
| | | | | and, Miraglia S et. al., Journal of Biomolecular Screening, 4: 193-204 (1999), the contents of each of |
| | | | | which is herein incorporated by reference in its entirety. Pancreatic cells that may be used according to |
| | | | | these assays are publicly available (e.g., through the ATCC) and/or may be routinely generated. |
| | | | | Exemplary pancreatic cells that may be used according to these assays include rat INS-1 cells. INS-1 |
| | | | | cells are a semi-adherent cell line established from cells isolated from an X-ray induced rat transplantable |
| | | | | insulinoma. These cells retain characteristics typical of native pancreatic beta cells including glucose |
| | | | | inducible insulin secretion. References: Asfari et al. Endocrinology 1992 130: 167. |
| 40 | HDPSB18 | 339 | Production of | IL-10 FMAT. Assays for immunomodulatory proteins produced by activated T cells, B cells, and |
| | | | IL-10 and | monocytes that exhibit anti-inflammatory activity and downregulate monocyte/macrophage function and |
| | | | downregulation | expression of cytokines are well known in the art and may be used or routinely modified to assess the |
| | | | of immune responses | ability of the polypeptides of the invention (including antibodies and agonists or antagonists of the |
| | | | | invention) to mediate immunomodulation, regulate inflammatory activities, and modulate immune cell |
| | | | | function and cytokine production. Exemplary assays that test for immunomodulatory proteins evaluate |
| | | | | the production of cytokines, such as IL-10, and the downmodulation of immune responses. Such assays |
| | | | | that may be used or routinely modified to test immunomodulatory activity of polypeptides of the |
| | | | | invention (including antibodies and agonists or antagonists of the invention) include the assays disclosed |
| | | | | in Miraglia et al., J Biomolecular Screening 4: 193-204 (1999); Rowland et al., “Lymphocytes: a practical |
| | | | | approach” Chapter 6: 138-160 (2000); and Koning et al., Cytokine 9(6): 427-436 (1997), the contents of |
| | | | | each of which are herein incorporated by reference in its entirety. Human T cells that may be used |
| | | | | according to these assays may be isolated using techniques disclosed herein or otherwise known in the |
| | | | | art. Human T cells are primary human lymphocytes that mature in the thymus and express a T cell |
| | | | | receptor and CD3, CD4, or CD8. These cells mediate humoral or cell-mediated immunity and may be preactivated |
| | | | | to enhance responsiveness to immunomodulatory factors. |
| 41 | HDPSH53 | 340 | Stimulation of | Assays for measuring calcium flux are well-known in the art and may be used or routinely modified to |
| | | | Calcium Flux in | assess the ability of polypeptides of the invention (including antibodies and agonists or antagonists of the |
| | | | pancreatic beta | invention) to mobilize calcium. For example, the FLPR assay may be used to measure influx of calcium. |
| | | | cells. | Cells normally have very low concentrations of cytosolic calcium compared to much higher extracellular |
| | | | | calcium. Extracellular factors can cause an influx of calcium, leading to activation of calcium responsive |
| | | | | signaling pathways and alterations in cell functions. Exemplary assays that may be used or routinely |
| | | | | modified to measure calcium flux by polypeptides of the invention (including antibodies and agonists or |
| | | | | antagonists of the invention) include assays disclosed in: Satin LS, et al., Endocrinology, 136(10): 4589-601 |
| | | | | (1995); Mogami H, et al., Endocrinology, 136(7): 2960-6 (1995); Richardson SB, et al., Biochem J, |
| | | | | 288 (Pt 3): 847-51 (1992); and, Meats, JE, et al., Cell Calcium 1989 Nov-Dec; 10(8): 535-41 (1989), the |
| | | | | contents of each of which is herein incorporated by reference in its entirety. Pancreatic cells that may be |
| | | | | used according to these assays are publicly available (e.g., through the ATCC) and/or may be routinely |
| | | | | generated. Exemplary pancreatic cells that may be used according to these assays include HITT15 Cells. |
| | | | | HITT15 are an adherent epithelial cell line established from Syrian hamster islet cells transformed with |
| | | | | SV40. These cells express glucagon, somatostatin, and glucocorticoid receptors. The cells secrete |
| | | | | insulin, which is stimulated by glucose and glucagon and suppressed by somatostatin or glucocorticoids. |
| | | | | ATTC# CRL-1777 Refs: Lord and Ashcroft. Biochem. J. 219: 547-551; Santerre et al. Proc. Natl. |
| | | | | Acad. Sci. USA 78: 4339-4343, 1981. |
| 42 | HDPSP01 | 341 | Production of | MCP-1 FMAT. Assays for immunomodulatory proteins that are produced by a large variety of cells and |
| | | | MCP-1 | act to induce chemotaxis and activation of monocytes and T cells are well known in the art and may be |
| | | | | used or routinely modified to assess the ability of polypeptides of the invention (including antibodies and |
| | | | | agonists or antagonists of the invention) to mediate immunomodulation, induce chemotaxis, and |
| | | | | modulate immune cell activation. Exemplary assays that test for immunomodulatory proteins evaluate |
| | | | | the production of cell surface markers, such as monocyte chemoattractant protein (MCP), and the |
| | | | | activation of monocytes and T cells. Such assays that may be used or routinely modified to test |
| | | | | immunomodulatory and diffferentiation activity of polypeptides of the invention (including antibodies |
| | | | | and agonists or antagonists of the invention) include assays disclosed in Miraglia et al., J Biomolecular |
| | | | | Screening 4: 193-204(1999); Rowland et al., “Lymphocytes: a practical approach” Chapter 6: 138-160 |
| | | | | (2000); Satthaporn and Eremin, J R Coll Surg Ednb 45(1): 9-19 (2001); and Verhasselt et al., J Immunol |
| | | | | 158: 2919-2925 (1997), the contents of each of which are herein incorporated by reference in its entirety. |
| | | | | Human dendritic cells that may be used according to these assays may be isolated using techniques |
| | | | | disclosed herein or otherwise known in the art. Human dendritic cells are antigen presenting cells in |
| | | | | suspension culture, which, when activated by antigen and/or cytokines, initiate and upregulate T cell |
| | | | | proliferation and functional activities. |
| 42 | HDPSP01 | 341 | Insulin | Assays for measuring secretion of insulin are well-known in the art and may be used or routinely |
| | | | Secretion | modified to assess the ability of polypeptides of the invention (including antibodies and agonists or |
| | | | | antagonists of the invention) to stimulate insulin secretion. For example, insulin secretion is measured by |
| | | | | FMAT using anti-rat insulin antibodies. Insulin secretion from pancreatic beta cells is upregulated by |
| | | | | glucose and also by certain proteins/peptides, and disregulation is a key component in diabetes. |
| | | | | Exemplary assays that may be used or routinely modified to test for stimulation of insulin secretion (from |
| | | | | pancreatic cells) by polypeptides of the invention (including antibodies and agonists or antagonists of the |
| | | | | invention) include assays disclosed in: Shimizu, H., et al., Endocr J, 47(3): 261-9 (2000); Salapatek, A. M., |
| | | | | et al., Mol Endocrinol, 13(8): 1305-17 (1999); Filipsson, K., et al., Ann N Y Acad Sci, 865: 441-4 |
| | | | | (1998); Olson, L. K., et al., J Biol Chem, 271(28): 16544-52 (1996); and, Miraglia S et. al., Journal of |
| | | | | Biomolecular Screening, 4: 193-204 (1999), the contents of each of which is herein incorporated by |
| | | | | reference in its entirety. Pancreatic cells that may be used according to these assays are publicly |
| | | | | available (e.g., through the ATCC) and/or may be routinely generated. Exemplary pancreatic cells that |
| | | | | may be used according to these assays include HITT15 Cells. HITT15 are an adherent epithelial cell line |
| | | | | established from Syrian hamster islet cells transformed with SV40. These cells express glucagon, |
| | | | | somatostatin, and glucocorticoid receptors. The cells secrete insulin, which is stimulated by glucose and |
| | | | | glucagon and suppressed by somatostatin or glucocorticoids. ATTC# CRL-1777 Refs: Lord and |
| | | | | Ashcroft. Biochem. J. 219: 547-551; Santerre et al. Proc. Natl. Acad. Sci. USA 78: 4339-4343, 1981. |
| 43 | HDPSP54 | 342 | Activation of | Kinase assay. JNK kinase assays for signal transduction that regulate cell proliferation, activation, or |
| | | | Endothelial Cell | apoptosis are well known in the art and may be used or routinely modified to assess the ability of |
| | | | JNK Signaling Pathway. | polypeptides of the invention (including antibodies and agonists or antagonists of the invention) to |
| | | | | promote or inhibit cell proliferation, activation, and apoptosis. Exemplary assays for JNK kinase activity |
| | | | | that may be used or routinely modified to test JNK kinase-induced activity of polypeptides of the |
| | | | | invention (including antibodies and agonists or antagonists of the invention) include the assays disclosed |
| | | | | in Forrer et al., Biol Chem 379(8-9): 1101-1110 (1998); Gupta et al., Exp Cell Res 247(2): 495-504 |
| | | | | (1999); Kyriakis JM, Biochem Soc Symp 64: 29-48 (1999); Chang and Karin, Nature 410(6824): 37-40 |
| | | | | (2001); and Cobb MH, Prog Biophys Mol Biol 71(3-4): 479-500 (1999); the contents of each of which are |
| | | | | herein incorporated by reference in its entirety. Endothelial cells that may be used according to these |
| | | | | assays are publicly available (e.g., through the ATCC). Exemplary endothelial cells that may be used |
| | | | | according to these assays include human umbilical vein endothelial cells (HUVEC), which are endothelial cells which |
| | | | | line venous blood vessels, and are involved in functions that include, but are not limited to, angiogenesis, vascular |
| | | | | permeability, vascular tone, and immune cell extravasation. |
| 43 | HDPSP54 | 342 | Regulation of | Caspase Apoptosis. Assays for caspase apoptosis are well known in the art and may be used or |
| | | | apoptosis in | routinely modified to assess the ability of polypeptides of the invention (including antibodies and |
| | | | pancreatic beta | agonists or antagonists of the invention) to promote caspase protease-mediated apoptosis. Apoptosis in |
| | | | cells. | pancreatic beta is associated with induction and progression of diabetes. Exemplary assays for caspase |
| | | | | apoptosis that may be used or routinely modified to test capase apoptosis activity of polypeptides of the |
| | | | | invention (including antibodies and agonists or antagonists of the invention) include the assays disclosed |
| | | | | in: Loweth, AC, et al., FEBS Lett, 400(3): 285-8 (1997); Saini, KS, et at., Biochem Mol Biol Int, |
| | | | | 39(6): 1229-36 (1996); Krautheim, A., et at., Br J Pharmacol, 129(4): 687-94 (2000); Chandra J, et al., |
| | | | | Diabetes, 50 Suppl 1: S44-7 (2001); Suk K, et al., J Immunol, 166(7): 4481-9 (2001); Tejedo J, et al., |
| | | | | FEBS Lett, 459(2): 238-43 (1999); Zhang, S., et al., FEBS Lett, 455(3): 315-20 (1999); Lee et at., FEBS |
| | | | | Lett 485(2-3): 122-126 (2000); Nor et. al., J Vasc Res 37(3): 209-218 (2000); and Karsan and Harlan, J |
| | | | | Atheroscler Thromb 3(2): 75-80 (1996); the contents of each of which are herein incorporated by |
| | | | | reference in its entirety. Pancreatic cells that may be used according to these assays are publicly |
| | | | | available (e.g., through the ATCC) and/or may be routinely generated. Exemplary pancreatic cells that |
| | | | | may be used according to these assays include RIN-m. RIN-m is a rat adherent pancreatic beta cell |
| | | | | insulinoma cell line derived from a radiation induced transplantable rat islet cell tumor. The cells |
| | | | | produce and secrete islet polypeptide hormones, and produce insulin, somatostatin, and possibly |
| | | | | glucagon. ATTC: #CRL-2057 Chick et al. Proc. Natl. Acad. Sci. 1977 74: 628; AF et al. Proc. Natl. |
| | | | | Acad. Sci. 1980 77: 3519. |
| 43 | HDPSP54 | 342 | Production of | Assays for production of IL-10 and activation of T-cells are well known in the art and may be used or |
| | | | IL-10 and | routinely modified to assess the ability of polypeptides of the invention (including antibodies and |
| | | | activation of T- | agonists or antagonists of the invention) to stimulate or inhibit production of IL-10 and/or activation of |
| | | | cells. | T-cells. Exemplary assays that may be used or routinely modified to assess the ability of polypeptides |
| | | | | and antibodies of the invention (including agonists or antagonists of the invention) to modulate IL-10 |
| | | | | production and/or T-cell proliferation include, for example, assays such as disclosed and/or cited in: |
| | | | | Robinson, DS, et al., “Th-2 cytokines in allergic disease” Br Med Bull; 56 (4): 956-968 (2000), and |
| | | | | Cohn, et al., “T-helper type 2 cell-directed therapy for asthma” Pharmacology & Therapeutics; 88: 187-196 |
| | | | | (2000); the contents of each of which are herein incorporated by reference in their entirety. |
| | | | | Exemplary cells that may be used according to these assays include Th2 cells. IL10 secreted from Th2 |
| | | | | cells may be measured as a marker of Th2 cell activation. Th2 cells are a class of T cells that secrete |
| | | | | IL4, IL10, IL13, IL5 and IL6. Factors that induce differentiation and activation of Th2 cells play a |
| | | | | major role in the initiation and pathogenesis of allergy and asthma. Primary T helper 2 cells are |
| | | | | generated via in vitro culture under Th2 polarizing conditions using peripheral blood lymphocytes |
| | | | | isolated from cord blood. |
| 44 | HDPUW68 | 343 | Activation of | Kinase assay. Kinase assays, for example an Elk-1 kinase assay, for ERK signal transduction that |
| | | | Adipocyte ERK | regulate cell proliferation or differentiation are well known in the art and may be used or routinely |
| | | | Signaling | modified to assess the ability of polypeptides of the invention (including antibodies and agonists or |
| | | | Pathway | antagonists of the invention) to promote or inhibit cell proliferation, activation, and differentiation. |
| | | | | Exemplary assays for ERK kinase activity that may be used or routinely modified to test ERK kinase- |
| | | | | induced activity of polypeptides of the invention (including antibodies and agonists or antagonists of the |
| | | | | invention) include the assays disclosed in Forrer et al., Biol Chem 379(8-9): 1101-1110 (1998); Le |
| | | | | Marchand-Brustel Y, Exp Clin Endocrinol Diabetes 107(2): 126-132 (1999); Kyriakis JM, Biochem Soc |
| | | | | Symp 64: 29-48 (1999); Chang and Karin, Nature 410(6824): 37-40 (2001); and Cobb MH, Prog Biophys |
| | | | | Mol Biol 71(3-4): 479-500 (1999); the contents of each of which are herein incorporated by reference in |
| | | | | its entirety. Mouse adipocyte cells that may be used according to these assays are publicly available |
| | | | | (e.g., through the ATCC). Exemplary mouse adipocyte cells that may be used according to these assays |
| | | | | include 3T3-L1 cells. 3T3-L1 is an adherent mouse preadipocyte cell line that is a continuous substrain |
| | | | | of 3T3 fibroblast cells developed through clonal isolation and undergo a pre-adipocyte to adipose-like |
| | | | | conversion under appropriate differentiation conditions known in the art. |
| 44 | HDPUW68 | 343 | Activation of | Assays for the activation of transcription through the Serum Response Element (SRE) are well-known in |
| | | | transcription | the art and may be used or routinely modified to assess the ability of polypeptides of the invention |
| | | | through serum | (including antibodies and agonists or antagonists of the invention) to regulate the serum response factors |
| | | | response | and modulate the expression of genes involved in growth. Exemplary assays for transcription through |
| | | | element in | the SRE that may be used or routinely modified to test SRE activity of the polypeptides of the invention |
| | | | immune cells | (including antibodies and agonists or antagonists of the invention) include assays disclosed in Berger et |
| | | | (such as T- | al., Gene 66: 1-10 (1998); Cullen and Malm, Methods in Euzymol 216: 362-368 (1992); Henthorn et al., |
| | | | cells). | Proc Natl Acad Sci USA 85: 6342-6346 (1988); and Black et al., Virus Genes 12(2): 105-117 (1997), the |
| | | | | content of each of which are herein incorporated by reference in its entirety. T cells that may be used |
| | | | | according to these assays are publicly available (e.g., through the ATCC). Exemplary mouse T cells that |
| | | | | may be used according to these assays include the CTLL cell line, which is an IL-2 dependent suspension |
| | | | | culture of T cells with cytotoxic activity. |
| 44 | HDPUW68 | 343 | Stimulation of | Assays for measuring calcium flux are well-known in the art and may be used or routinely modified to |
| | | | Calcium Flux in | assess the ability of polypeptides of the invention (including antibodies and agonists or antagonists of the |
| | | | pancreatic beta | invention) to mobilize calcium. For example, the FLPR assay may be used to measure influx of calcium. |
| | | | cells. | Cells normally have very low concentrations of cytosolic calcium compared to much higher extracellular |
| | | | | calcium. Extracellular factors can cause an influx of calcium, leading to activation of calcium responsive |
| | | | | signaling pathways and alterations in cell functions. Exemplary assays that may be used or routinely |
| | | | | modified to measure calcium flux by polypeptides of the invention (including antibodies and agonists or |
| | | | | antagonists of the invention) include assays disclosed in: Satin LS, et al., Endocrinology, 136(10): 4589-601 |
| | | | | (1995); Mogami H, et al., Endocrinology, 136(7): 2960-6 (1995); Richardson SB, et al., Biochem J, |
| | | | | 288 (Pt 3): 847-51 (1992); and, Meats, JE, et al., Cell Calcium 1989 Nov-Dec; 10(8): 535-41 (1989), the |
| | | | | contents of each of which is herein incorporated by reference in its entirety. Pancreatic cells that may be |
| | | | | used according to these assays are publicly available (e.g., through the ATCC) and/or may be routinely |
| | | | | generated. Exemplary pancreatic cells that may be used according to these assays include HITT15 Cells. |
| | | | | HITT15 are an adherent epithelial cell line established from Syrian hamster islet cells transformed with |
| | | | | SV40. These cells express glucagon, somatostatin, and glucocorticoid receptors. The cells secrete |
| | | | | insulin, which is stimulated by glucose and glucagon and suppressed by somatostatin or glucocorticoids. |
| | | | | ATTC# CRL-1777 Refs: Lord and Ashcroft. Biochem. J. 219: 547-551; Santerre et al. Proc. Natl. |
| | | | | Acad. Sci. USA 78: 4339-4343, 1981. |
| 44 | HDPUW68 | 343 | Activation of | Kinase assay. Kinase assays, for example an GSK-3 kinase assay, for PI3 kinase signal transduction that |
| | | | Skeletal Mucle | regulate glucose metabolism and cell survivial are well-known in the art and may be used or routinely |
| | | | Cell PI3 Kinase | modified to assess the ability of polypeptides of the invention (including antibodies and agonists or |
| | | | Signalling | antagonists of the invention) to promote or inhibit glucose metabolism and cell survival. Exemplary |
| | | | Pathway | assays for PI3 kinase activity that may be used or routinely modified to test PI3 kinase-induced activity |
| | | | | of polypeptides of the invention (including antibodies and agonists or antagonists of the invention) |
| | | | | include assays disclosed in Forrer et al., Biol Chem 379(8-9): 1101-1110 (1998); Nikoulina et al., |
| | | | | Diabetes 49(2): 263-271 (2000); and Schreyer et al., Diabetes 48(8): 1662-1666 (1999), the contents of |
| | | | | each of which are herein incorporated by reference in its entirety. Rat myoblast cells that may be used |
| | | | | according to these assays are publicly available (e.g., through the ATCC). Exemplary rat myoblast cells |
| | | | | that may be used according to these assays include L6 cells. L6 is an adherent rat myoblast cell line, |
| | | | | isolated from primary cultures of rat thigh muscle, that fuses to form multinucleated myotubes and |
| | | | | striated fibers after culture in differentiation media. |
| 45 | HDPXY01 | 344 | Insulin | Assays for measuring secretion of insulin are well-known in the art and may be used or routinely |
| | | | Secretion | modified to assess the ability of polypeptides of the invention (including antibodies and agonists or |
| | | | | antagonists of the invention) to stimulate insulin secretion. For example, insulin secretion is measured by |
| | | | | FMAT using anti-rat insulin antibodies. Insulin secretion from pancreatic beta cells is upregulated by |
| | | | | glucose and also by certain proteins/peptides, and disregulation is a key component in diabetes. |
| | | | | Exemplary assays that may be used or routinely modified to test for stimulation of insulin secretion (from |
| | | | | pancreatic cells) by polypeptides of the invention (including antibodies and agonists or antagonists of the |
| | | | | invention) include assays disclosed in: Shimizu, H., et al., Endocr J, 47(3): 261-9 (2000); Salapatek, A. M., |
| | | | | et al., Mol Endocrinol, 13(8): 1305-17 (1999); Filipsson, K., et al., Ann N Y Acad Sci, 865: 441-4 |
| | | | | (1998); Olson, L. K., et al., J Biol Chem, 271(28): 16544-52 (1996); and, Miraglia S et. al., Journal of |
| | | | | Biomolecular Screening, 4: 193-204 (1999), the contents of each of which is herein incorporated by |
| | | | | reference in its entirety. Pancreatic cells that may be used according to these assays are publicly |
| | | | | available (e.g., through the ATCC) and/or may be routinely generated. Exemplary pancreatic cells that |
| | | | | may be used according to these assays include HITT15 Cells. HITT15 are an adherent epithelial cell line |
| | | | | established from Syrian hamster islet cells transformed with SV40. These cells express glucagon, |
| | | | | somatostatin, and glucocorticoid receptors. The cells secrete insulin, which is stimulated by glucose and |
| | | | | glucagon and suppressed by somatostatin or glucocorticoids. ATTC# CRL-1777 Refs: Lord and |
| | | | | Ashcroft. Biochem. J. 219: 547-551; Santerre et al. Proc. Natl. Acad. Sci. USA 78: 4339-4343, 1981. |
| 46 | HDTBD53 | 345 | Myoblast cell | Assays for muscle cell proliferation are well known in the art and may be used or routinely modified to |
| | | | proliferation | assess the ability of polypeptides of the invention (including antibodies and agonists or antagonists of the |
| | | | | invention) to stimulate or inhibit myoblast cell proliferation. Exemplary assays for myoblast cell |
| | | | | proliferation that may be used or routinely modified to test activity of polypeptides and antibodies of the |
| | | | | invention (including agonists or antagonists of the invention) include, for example, assays disclosed in: |
| | | | | Soeta, C., et al. “Possible role for the c-ski gene in the proliferation of myogenic cells in regenerating |
| | | | | skeletal muscles of rats” Dev Growth Differ Apr; 43(2): 155-64 (2001); Ewton DZ, et al., “IGF binding |
| | | | | proteins-4, -5 and -6 may play specialized roles during L6 myoblast proliferation and differentiation” J |
| | | | | Endocrinol Mar; 144(3): 539-53 (1995); and, Pampusch MS, et al., “Effect of transforming growth factor |
| | | | | beta on proliferation of L6 and embryonic porcine myogenic cells” J Cell Physiol Jun; 143(3): 524-8 |
| | | | | (1990); the contents of each of which are herein incorporated by reference in their entirety. Exemplary |
| | | | | myoblast cells that may be used according to these assays include the rat myoblast L6 cell line. Rat |
| | | | | myoblast L6 cells are an adherent rat myoblast cell line, isolated from primary cultures of rat thigh |
| | | | | muscle, that fuse to form multinucleated myotubes and striated fibers after culture in differentiation |
| | | | | media. |
| 47 | HDTBV77 | 346 | Regulation of | Assays for the regulation of transcription through the DMEF1 response element are well-known in the art |
| | | | transcription via | and may be used or routinely modified to assess the ability of polypeptides of the invention (including |
| | | | DMEF1 | antibodies and agonists or antagonists of the invention) to activate the DMEF1 response element in a |
| | | | response | reporter construct (such as that containing the GLUT4 promoter) and to regulate insulin production. The |
| | | | element in | DMEF1 response element is present in the GLUT4 promoter and binds to MEF2 transcription factor and |
| | | | adipocytes and | another transcription factor that is required for insulin regulation of Glut4 expression in skeletal muscle. |
| | | | pre-adipocytes | GLUT4 is the primary insulin-responsive glucose transporter in fat and muscle tissue. Exemplary assays |
| | | | | that may be used or routinely modified to test for DMEF1 response element activity (in adipocytes and |
| | | | | pre-adipocytes) by polypeptides of the invention (including antibodies and agonists or antagonists of the |
| | | | | invention) include assays disclosed inThai, M. V., et al., J Biol Chem, 273(23): 14285-92 (1998); Mora, S., |
| | | | | et al., J Biol Chem, 275(21): 16323-8 (2000); Liu, M. L., et al., J Biol Chem, 269(45): 28514-21 (1994); |
| | | | | “Identification of a 30-base pair regulatory element and novel DNA binding protein that regulates the |
| | | | | human GLUT4 promoter in transgenic mice”, J Biol Chem. 2000 Aug 4; 275(31): 23666-73; Berger, et al., |
| | | | | Gene 66: 1-10 (1988); and, Cullen, B., et al., Methods in Enzymol. 216: 362-368 (1992), the contents of |
| | | | | each of which is herein incorporated by reference in its entirety. Adipocytes and pre-adipocytes that may |
| | | | | be used according to these assays are publicly available (e.g., through the ATCC) and/or may be |
| | | | | routinely generated. Exemplary cells that may be used according to these assays include the mouse 3T3- |
| | | | | L1 cell line which is an adherent mouse preadipocyte cell line. Mouse 3T3-L1 cells are a continuous |
| | | | | substrain of 3T3 fibroblasts developed through clonal isolation. These cells undergo a pre-adipocyte to |
| | | | | adipose-like conversion under appropriate differentiation culture conditions. |
| 48 | HDTDQ23 | 347 | Endothelial Cell | Caspase Apoptosis. Assays for caspase apoptosis are well known in the art and may be used or routinely |
| | | | Apoptosis | modified to assess the ability of polypeptides of the invention (including antibodies and agonists or |
| | | | | antagonists of the invention) to promote caspase protease-mediated apoptosis. Induction of apoptosis in |
| | | | | endothelial cells supporting the vasculature of tumors is associated with tumor regression due to loss of |
| | | | | tumor blood supply. Exemplary assays for caspase apoptosis that may be used or routinely modified to |
| | | | | test capase apoptosis activity of polypeptides of the invention (including antibodies and agonists or |
| | | | | antagonists of the invention) include the assays disclosed in Lee et al., FEBS Lett 485(2-3): 122-126 |
| | | | | (2000); Nor et al., J Vasc Res 37(3): 209-218 (2000); and Karsan and Harlan, J Atheroscler Thromb 3(2): |
| | | | | 75-80 (1996); the contents of each of which are herein incorporated by reference in its entirety. |
| | | | | Endothelial cells that may be used according to these assays are publicly available (e.g., through |
| | | | | commercial sources). Exemplary endothelial cells that may be used according to these assays include |
| | | | | bovine aortic endothelial cells (bAEC), which are an example of endothelial cells which line blood |
| | | | | vessels and are involved in functions that include, but are not limited to, angiogenesis, vascular |
| | | | | permeability, vascular tone, and immune cell extravasation. |
| 48 | HDTDQ23 | 347 | Stimulation of | Assays for measuring calcium flux are well-known in the art and may be used or routinely modified to |
| | | | Calcium Flux in | assess the ability of polypeptides of the invention (including antibodies and agonists or antagonists of the |
| | | | pancreatic beta | invention) to mobilize calcium. For example, the FLPR assay may be used to measure influx of calcium. |
| | | | cells. | Cells normally have very low concentrations of cytosolic calcium compared to much higher extracellular |
| | | | | calcium. Extracellular factors can cause an influx of calcium, leading to activation of calcium responsive |
| | | | | signaling pathways and alterations in cell functions. Exemplary assays that may be used or routinely |
| | | | | modified to measure calcium flux by polypeptides of the invention (including antibodies and agonists or |
| | | | | antagonists of the invention) include assays disclosed in: Satin LS, et al., Endocrinology, 136(10): 4589-601 |
| | | | | (1995); Mogami H, et al., Endocrinology, 136(7): 2960-6 (1995); Richardson SB, et al., Biochem J, |
| | | | | 288 (Pt 3): 847-51 (1992); and, Meats, JE, et al., Cell Calcium 1989 Nov-Dec; 10(8): 535-41 (1989), the |
| | | | | contents of each of which is herein incorporated by reference in its entirety. Pancreatic cells that may be |
| | | | | used according to these assays are publicly available (e.g., through the ATCC) and/or may be routinely |
| | | | | generated. Exemplary pancreatic cells that may be used according to these assays include HITT15 Cells. |
| | | | | HITT15 are an adherent epithelial cell line established from Syrian hamster islet cells transformed with |
| | | | | SV40. These cells express glucagon, somatostatin, and glucocorticoid receptors. The cells secrete |
| | | | | insulin, which is stimulated by glucose and glucagon and suppressed by somatostatin or glucocorticoids. |
| | | | | ATTC# CRL-1777 Refs: Lord and Ashcroft. Biochem. J. 219: 547-551; Santerre et al. Proc. Natl. |
| | | | | Acad. Sci. USA 78: 4339-4343, 1981. |
| 49 | HE2DE47 | 348 | Regulation of | Caspase Apoptosis. Assays for caspase apoptosis are well known in the art and may be used or |
| | | | apoptosis in | routinely modified to assess the ability of polypeptides of the invention (including antibodies and |
| | | | pancreatic beta | agonists or antagonists of the invention) to promote caspase protease-mediated apoptosis. Apoptosis in |
| | | | cells. | pancreatic beta is associated with induction and progression of diabetes. Exemplary assays for caspase |
| | | | | apoptosis that may be used or routinely modified to test capase apoptosis activity of polypeptides of the |
| | | | | invention (including antibodies and agonists or antagonists of the invention) include the assays disclosed |
| | | | | in: Loweth, AC, et al., FEBS Lett, 400(3): 285-8 (1997); Saini, KS, et al., Biochem Mol Biol Int, |
| | | | | 39(6): 1229-36 (1996); Krautheim, A., et al., Br J Pharmacol, 129(4): 687-94 (2000); Chandra J, et al., |
| | | | | Diabetes, 50 Suppl 1: S44-7 (2001); Suk K, et al., J Immunol, 166(7): 4481-9 (2001); Tejedo J, et al., |
| | | | | FEBS Lett, 459(2): 238-43 (1999); Zhang, S., et al., FEBS Lett, 455(3): 315-20 (1999); Lee et al., FEBS |
| | | | | Lett 485(2-3): 122-126 (2000); Nor et al., J Vasc Res 37(3): 209-218 (2000); and Karsan and Harlan, J |
| | | | | Atheroscler Thromb 3(2): 75-80 (1996); the contents of each of which are herein incorporated by |
| | | | | reference in its entirety. Pancreatic cells that may be used according to these assays are publicly |
| | | | | available (e.g., through the ATCC) and/or may be routinely generated. Exemplary pancreatic cells that |
| | | | | may be used according to these assays include RIN-m. RIN-m is a rat adherent pancreatic beta cell |
| | | | | insulinoma cell line derived from a radiation induced transplantable rat islet cell tumor. The cells |
| | | | | produce and secrete islet polypeptide hormones, and produce insulin, somatostatin, and possibly |
| | | | | glucagon. ATTC: #CRL-2057 Chick et al. Proc. Natl. Acad. Sci. 1977 74: 628; AF et al. Proc. Natl. |
| | | | | Acad. Sci. 1980 77: 3519. |
| 50 | HE2NV57 | 349 | Activation of T- | Kinase assay. JNK and p38 kinase assays for signal transduction that regulate cell proliferation, |
| | | | Cell p38 or JNK | activation, or apoptosis are well known in the art and may be used or routinely modified to assess the |
| | | | Signaling | ability of polypeptides of the invention (including antibodies and agonists or antagonists of the invention) |
| | | | Pathway. | to promote or inhibit immune cell (e.g. T-cell) proliferation, activation, and apoptosis. Exemplary assays |
| | | | | for JNK and p38 kinase activity that may be used or routinely modified to test JNK and p38 kinase- |
| | | | | induced activity of polypeptides of the invention (including antibodies and agonists or antagonists of the |
| | | | | invention) include the assays disclosed in Forrer et al., Biol Chem 379(8-9): 1101-1110 (1998); Gupta et |
| | | | | al., Exp Cell Res 247(2): 495-504 (1999); Kyriakis JM, Biochem Soc Symp 64: 29-48 (1999); Chang and |
| | | | | Karin, Nature 410(6824): 37-40 (2001); and Cobb MH, Prog Biophys Mol Biol 71(3-4): 479-500 (1999); |
| | | | | the contents of each of which are herein incorporated by reference in its entirety. T cells that may be |
| | | | | used according to these assays are publicly available (e.g., through the ATCC). Exemplary mouse T cells |
| | | | | that may be used according to these assays include the CTLL cell line, which is an IL-2 dependent |
| | | | | suspension-culture cell line with cytotoxic activity. |
| 50 | HE2NV57 | 349 | Activation of | Assays for the activation of transcription through the AP1 response element are known in the art and may |
| | | | transcription | be used or routinely modified to assess the ability of polypeptides of the invention (including antibodies |
| | | | through AP1 | and agonists or antagonists of the invention) to modulate growth and other cell functions. Exemplary |
| | | | response | assays for transcription through the AP1 response element that may be used or routinely modified to test |
| | | | element in | AP1-response element activity of polypeptides of the invention (including antibodies and agonists or |
| | | | immune cells | antagonists of the invention) include assays disclosed in Berger et al., Gene 66: 1-10 (1988); Cullen and |
| | | | (such as T- | Malm, Methods in Enzymol 216: 362-368 (1992); Henthorn et al., Proc Natl Acad Sci USA 85: 6342-6346 |
| | | | cells). | (1988); Rellahan et al., J Biol Chem 272(49): 30806-30811 (1997); Chang et al., Mol Cell Biol |
| | | | | 18(9): 4986-4993 (1998); and Fraser et al., Eur J Immunol 29(3): 838-844 (1999), the contents of each of |
| | | | | which are herein incorporated by reference in its entirety. T cells that may be used according to these |
| | | | | assays are publicly available (e.g., through the ATCC). Exemplary mouse T cells that may be used |
| | | | | according to these assays include the CTLL cell line, which is an IL-2 dependent suspension-culture cell |
| | | | | line with cytotoxic activity. |
| 50 | HE2NV57 | 349 | Activation of | Assays for the activation of transcription through the cAMP response element are well-known in the art |
| | | | transcription | and may be used or routinely modified to assess the ability of polypeptides of the invention (including |
| | | | through cAMP | antibodies and agonists or antagonists of the invention) to increase cAMP and regulate CREB |
| | | | response | transcription factors, and modulate expression of genes involved in a wide variety of cell functions. |
| | | | element in | Exemplary assays for transcription through the cAMP response element that may be used or routinely |
| | | | immune cells | modified to test cAMP-response element activity of polypeptides of the invention (including antibodies |
| | | | (such as T- | and agonists or antagonists of the invention) include assays disclosed in Berger et al., Gene 66: 1-10 |
| | | | cells). | (1998); Cullen and Malm, Methods in Enzymol 216: 362-368 (1992); Henthorn et al., Proc Natl Acad Sci |
| | | | | USA 85: 6342-6346 (1988); Black et al., Virus Genes 15(2): 105-117 (1997); and Belkowski et al., J |
| | | | | Immunol 161(2): 659-665 (1998), the contents of each of which are herein incorporated by reference in its |
| | | | | entirety. T cells that may be used according to these assays are publicly available (e.g., through the |
| | | | | ATCC). Exemplary mouse T cells that may be used according to these assays include the CTLL cell |
| | | | | line, which is a suspension culture of IL-2 dependent cytotoxic T cells. |
| 50 | HE2NV57 | 349 | Activation of | Assays for the activation of transcription through the Gamma Interferon Activation Site (GAS) response |
| | | | transcription | element are well-known in the art and may be used or routinely modified to assess the ability of |
| | | | through GAS | polypeptides of the invention (including antibodies and agonists or antagonists of the invention) to |
| | | | response | regulate STAT transcription factors and modulate gene expression involved in a wide variety of cell |
| | | | element in | functions. Exemplary assays for transcription through the GAS response element that may be used or |
| | | | immune cells | routinely modified to test GAS-response element activity of polypeptides of the invention (including |
| | | | (such as T- | antibodies and agonists or antagonists of the invention) include assays disclosed in Berger et al., Gene |
| | | | cells). | 66: 1-10 (1998); Cullen and Malm, Methods in Enzymol 216: 362-368 (1992); Henthorn et al., Proc Natl |
| | | | | Acad Sci USA 85: 6342-6346 (1988); Matikainen et al., Blood 93(6): 1980-1991 (1999); and Henttinen et |
| | | | | al., J Immunol 155(10): 4582-4587 (1995), the contents of each of which are herein incorporated by |
| | | | | reference in its entirety. Exemplary mouse T cells that may be used according to these assays are |
| | | | | publicly available (e.g., through the ATCC). Exemplary T cells that may be used according to these |
| | | | | assays include the CTLL cell line, which is a suspension culture of IL-2 dependent cytotoxic T cells. |
| 50 | HE2NV57 | 349 | Activation of | Assays for the activation of transcription through the Serum Response Element (SRE) are well-known in |
| | | | transcription | the art and may be used or routinely modified to assess the ability of polypeptides of the invention |
| | | | through serum | (including antibodies and agonists or antagonists of the invention) to regulate the serum response factors |
| | | | response | and modulate the expression of genes involved in growth. Exemplary assays for transcription through |
| | | | element in | the SRE that may be used or routinely modified to test SRE activity of the polypeptides of the invention |
| | | | immune cells | (including antibodies and agonists or antagonists of the invention) include assays disclosed in Berger et |
| | | | (such as T- | al., Gene 66: 1-10 (1998); Cullen and Malm, Methods in Enzymol 216: 362-368 (1992); Henthorn et al., |
| | | | cells). | Proc Natl Acad Sci USA 85: 6342-6346 (1988); and Black et al., Virus Genes 12(2): 105-117 (1997), the |
| | | | | content of each of which are herein incorporated by reference in its entirety. T cells that may be used |
| | | | | according to these assays are publicly available (e.g., through the ATCC). Exemplary mouse T cells that |
| | | | | may be used according to these assays include the CTLL cell line, which is an IL-2 dependent suspension |
| | | | | culture of T cells with cytotoxic activity. |
| 50 | HE2NV57 | 349 | Insulin | Assays for measuring secretion of insulin are well-known in the art and may be used or routinely |
| | | | Secretion | modified to assess the ability of polypeptides of the invention (including antibodies and agonists or |
| | | | | antagonists of the invention) to stimulate insulin secretion. For example, insulin secretion is measured by |
| | | | | FMAT using anti-rat insulin antibodies. Insulin secretion from pancreatic beta cells is upregulated by |
| | | | | glucose and also by certain proteins/peptides, and disregulation is a key component in diabetes. |
| | | | | Exemplary assays that may be used or routinely modified to test for stimulation of insulin secretion (from |
| | | | | pancreatic cells) by polypeptides of the invention (including antibodies and agonists or antagonists of the |
| | | | | invention) include assays disclosed in: Shimizu, H., et al., Endocr J, 47(3): 261-9 (2000); Salapatek, A. M., |
| | | | | et al., Mol Endocrinol, 13(8): 1305-17 (1999); Filipsson, K., et al., Ann N Y Acad Sci, 865: 441-4 |
| | | | | (1998); Olson, L. K., et al., J Biol Chem, 271(28): 16544-52 (1996); and, Miraglia S et. al., Journal of |
| | | | | Biomolecular Screening, 4: 193-204 (1999), the contents of each of which is herein incorporated by |
| | | | | reference in its entirety. Pancreatic cells that may be used according to these assays are publicly |
| | | | | available (e.g., through the ATCC) and/or may be routinely generated. Exemplary pancreatic cells that |
| | | | | may be used according to these assays include HITT15 Cells. HITT15 are an adherent epithelial cell line |
| | | | | established from Syrian hamster islet cells transformed with SV40. These cells express glucagon, |
| | | | | somatostatin, and glucocorticoid receptors. The cells secrete insulin, which is stimulated by glucose and |
| | | | | glucagon and suppressed by somatostatin or glucocorticoids. ATTC# CRL-1777 Refs: Lord and |
| | | | | Ashcroft. Biochem. J. 219: 547-551; Santerre et al. Proc. Natl. Acad. Sci. USA 78: 4339-4343, 1981. |
| 50 | HE2NV57 | 349 | Activation of | Assays for the activation of transcription through the CD28 response element are well-known in the art |
| | | | transcription | and may be used or routinely modified to assess the ability of polypeptides of the invention (including |
| | | | through CD28 | antibodies and agonists or antagonists of the invention) to stimulate IL-2 expression in T cells. |
| | | | response | Exemplary assays for transcription through the CD28 response element that may be used or routinely |
| | | | element in | modified to test CD28-response element activity of polypeptides of the invention (including antibodies |
| | | | immune cells | and agonists or antagonists of the invention) include assays disclosed in Berger et al., Gene 66: 1-10 |
| | | | (such as T- | (1998); Cullen and Malm, Methods in Enzymol 216: 362-368 (1992); Henthorn et al., Proc Natl Acad Sci |
| | | | cells). | USA 85: 6342-6346 (1988); McGuire and Iacobelli, J Immunol 159(3): 1319-1327 (1997); Parra et al., J |
| | | | | Immunol 166(4): 2437-2443 (2001); and Butscher et al., J Biol Chem 3(1): 552-560 (1998), the contents |
| | | | | of each of which are herein incorporated by reference in its entirety. T cells that may be used according |
| | | | | to these assays are publicly available (e.g., through the ATCC). Exemplary human T cells that may be |
| | | | | used according to these assays include the JURKAT cell line, which is a suspension culture of leukemia |
| | | | | cells that produce IL-2 when stimulated. |
| 51 | HE2PH36 | 350 | Regulation of | Assays for the regulation of viability and proliferation of cells in vitro are well-known in the art and may |
| | | | viability and | be used or routinely modified to assess the ability of polypeptides of the invention (including antibodies |
| | | | proliferation of | and agonists or antagonists of the invention) to regulate viability and proliferation of pancreatic beta |
| | | | pancreatic beta | cells. For example, the Cell Titer-Glo luminescent cell viability assay measures the number of viable |
| | | | cells. | cells in culture based on quantitation of the ATP present which signals the presence of metabolically |
| | | | | active cells. Exemplary assays that may be used or routinely modified to test regulation of viability and |
| | | | | proliferation of pancreatic beta cells by polypeptides of the invention (including antibodies and agonists |
| | | | | or antagonists of the invention) include assays disclosed in: Friedrichsen BN, et al., Mol Endocrinol, |
| | | | | 15(1): 136-48 (2001); Huotari MA, et al., Endocrinology, 139(4): 1494-9 (1998); Hugl SR, et al., J Biol |
| | | | | Chem 1998 Jul 10; 273(28): 17771-9 (1998), the contents of each of which is herein incorporated by |
| | | | | reference in its entirety. Pancreatic cells that may be used according to these assays are publicly |
| | | | | available (e.g., through the ATCC) and/or may be routinely generated. Exemplary pancreatic cells that |
| | | | | may be used according to these assays include rat INS-1 cells. INS-1 cells are a semi-adherent cell line |
| | | | | established from cells isolated from an X-ray induced rat transplantable insulinoma. These cells retain |
| | | | | characteristics typical of native pancreatic beta cells including glucose inducible insulin secretion. |
| | | | | References: Asfari et al. Endocrinology 1992 130: 167. |
| 52 | HE8DS15 | 351 | Activation of | Kinase assay. Kinase assays, for example an Elk-1 kinase assay, for ERK signal transduction that |
| | | | Adipocyte ERK | regulate cell proliferation or differentiation are well known in the art and may be used or routinely |
| | | | Signaling | modified to assess the ability of polypeptides of the invention (including antibodies and agonists or |
| | | | Pathway | antagonists of the invention) to promote or inhibit cell proliferation, activation, and differentiation. |
| | | | | Exemplary assays for ERK kinase activity that may be used or routinely modified to test ERK kinase- |
| | | | | induced activity of polypeptides of the invention (including antibodies and agonists or antagonists of the |
| | | | | invention) include the assays disclosed in Forrer et at, Biol Chem 379(8-9): 1101-1110 (1998); Le |
| | | | | Marchand-Brustel Y, Exp Clin Endocrinol Diabetes 107(2): 126-132 (1999); Kyriakis JM, Biochem Soc |
| | | | | Symp 64: 29-48 (1999); Chang and Karin, Nature 410(6824): 37-40 (2001); and Cobb MH, Prog Biophys |
| | | | | Mol Biol 71(3-4): 479-500 (1999); the contents of each of which are herein incorporated by reference in |
| | | | | its entirety. Mouse adipocyte cells that may be used according to these assays are publicly available |
| | | | | (e.g., through the ATCC). Exemplary mouse adipocyte cells that may be used according to these assays |
| | | | | include 3T3-L1 cells. 3T3-L1 is an adherent mouse preadipocyte cell line that is a continuous substrain |
| | | | | of 3T3 fibroblast cells developed through clonal isolation and undergo a pre-adipocyte to adipose-like |
| | | | | conversion under appropriate differentiation conditions known in the art. |
| 52 | HE8DS15 | 351 | Regulation of | Assays for the regulation of transcription of Malic Enzyme are well-known in the art and may be used or |
| | | | transcription of | routinely modified to assess the ability of polypeptides of the invention (including antibodies and |
| | | | Malic Enzyme | agonists or antagonists of the invention) to regulate transcription of Malic Enzyme, a key enzyme in |
| | | | in adipocytes | lipogenesis. Malic enzyme is involved in lipogenesisand its expression is stimulted by insulin. ME |
| | | | | promoter contains two direct repeat (DR1)- like elements MEp and MEd identified as putative PPAR |
| | | | | response elements. ME promoter may also responds to AP1 and other transcription factors. Exemplary |
| | | | | assays that may be used or routinely modified to test for regulation of transcription of Malic Enzyme (in |
| | | | | adipoocytes) by polypeptides of the invention (including antibodies and agonists or antagonists of the |
| | | | | invention) include assays disclosed in: Streeper, R. S., et al., Mol Endocrinol, 12(11): 1778-91 (1998); |
| | | | | Garcia-Jimenez, C., et al., Mol Endocrinol, 8(10): 1361-9 (1994); Barroso, I., et al., J Biol Chem, |
| | | | | 274(25): 17997-8004 (1999); Ijpenberg, A., et al., J Biol Chem, 272(32): 20108-20117 (1997); Berger, et |
| | | | | al., Gene 66: 1-10 (1988); and, Cullen, B., et al., Methods in Enzymol. 216: 362-368 (1992), the contents |
| | | | | of each of which is herein incorporated by reference in its entirety. Hepatocytes that may be used |
| | | | | according to these assays are publicly available (e.g., through the ATCC) and/or may be routinely |
| | | | | generated. Exemplary hepatocytes that may be used according to these assays includes the H4IIE rat |
| | | | | liver hepatoma cell line. |
| 53 | HE9HY07 | 352 | Activation of | Kinase assay. Kinase assays, for example an Elk-1 kinase assay, for ERK signal transduction that |
| | | | Adipocyte ERK | regulate cell proliferation or differentiation are well known in the art and may be used or routinely |
| | | | Signaling | modified to assess the ability of polypeptides of the invention (including antibodies and agonists or |
| | | | Pathway | antagonists of the invention) to promote or inhibit cell proliferation, activation, and differentiation. |
| | | | | Exemplary assays for ERK kinase activity that may be used or routinely modified to test ERK kinase- |
| | | | | induced activity of polypeptides of the invention (including antibodies and agonists or antagonists of the |
| | | | | invention) include the assays disclosed in Forrer et al., Biol Chem 379(8-9): 1101-1110 (1998); Le |
| | | | | Marchand-Brustel Y, Exp Clin Endocrinol Diabetes 107(2): 126-132 (1999); Kyriakis JM, Biochem Soc |
| | | | | Symp 64: 29-48 (1999); Chang and Karin, Nature 410(6824): 37-40 (2001); and Cobb MH, Prog Biophys |
| | | | | Mol Biol 71(3-4): 479-500 (1999); the contents of each of which are herein incorporated by reference in |
| | | | | its entirety. Mouse adipocyte cells that may be used according to these assays are publicly available |
| | | | | (e.g., through the ATCC). Exemplary mouse adipocyte cells that may be used according to these assays |
| | | | | include 3T3-L1 cells. 3T3-L1 is an adherent mouse preadipocyte cell line that is a continuous substrain |
| | | | | of 3T3 fibroblast cells developed through clonal isolation and undergo a pre-adipocyte to adipose-like |
| | | | | conversion under appropriate differentiation conditions known in the art. |
| 53 | HE9HY07 | 352 | Regulation of | Assays for the regulation of transcription through the FAS promoter element are well-known in the art |
| | | | transcription | and may be used or routinely modified to assess the ability of polypeptides of the invention (including |
| | | | through the FAS | antibodies and agonists or antagonists of the invention) to activate the FAS promoter element in a |
| | | | promoter | reporter construct and to regulate transcription of FAS, a key enzyme for lipogenesis. FAS promoter is |
| | | | element in | regulated by many transcription factors including SREBP. Insulin increases FAS gene transcription in |
| | | | hepatocytes | livers of diabetic mice. This stimulation of transcription is also somewhat glucose dependent. |
| | | | | Exemplary assays that may be used or routinely modified to test for FAS promoter element activity (in |
| | | | | hepatocytes) by polypeptides of the invention (including antibodies and agonists or antagonists of the |
| | | | | invention) include assays disclosed in Xiong, S., et al., Proc Natl Acad Sci U.S.A., 97(8): 3948-53 (2000); |
| | | | | Roder, K., et al., Eur J Biochem, 260(3): 743-51 (1999); Oskouian B, et al., Biochem J, 317 (Pt 1): 257-65 |
| | | | | (1996); Berger, et al., Gene 66: 1-10 (1988); and, Cullen, B., et al., Methods in Enzymol. 216: 362-368 |
| | | | | (1992), the contents of each of which is herein incorporated by reference in its entirety. Hepatocytes that |
| | | | | may be used according to these assays, such as H4IIE cells, are publicly available (e.g., through the |
| | | | | ATCC) and/or may be routinely generated. Exemplary hepatocytes that may be used according to these |
| | | | | assays include rat liver hepatoma cell line(s) inducible with glucocorticoids, insulin, or cAMP |
| | | | | derivatives. |
| 54 | HEOMQ63 | 353 | Stimulation of | Assays for measuring secretion of insulin are well-known in the art and may be used or routinely |
| | | | insulin secretion | modified to assess the ability of polypeptides of the invention (including antibodies and agonists or |
| | | | from pancreatic | antagonists of the invention) to stimulate insulin secretion. For example, insulin secretion is measured by |
| | | | beta cells. | FMAT using anti-rat insulin antibodies. Insulin secretion from pancreatic beta cells is upregulated by |
| | | | | glucose and also by certain proteins/peptides, and disregulation is a key component in diabetes. |
| | | | | Exemplary assays that may be used or routinely modified to test for stimulation of insulin secretion (from |
| | | | | pancreatic cells) by polypeptides of the invention (including antibodies and agonists or antagonists of the |
| | | | | invention) include assays disclosed in: Ahren, B., et al., Am J Physiol, 277(4 Pt 2): R959-66 (1999); Li, M., |
| | | | | et al., Endocrinology, 138(9): 3735-40 (1997); Kim, K. H., et al., FEBS Lett, 377(2): 237-9 (1995); |
| | | | | and, Miraglia S et. al., Journal of Biomolecular Screening, 4: 193-204 (1999), the contents of each of |
| | | | | which is herein incorporated by reference in its entirety. Pancreatic cells that may be used according to |
| | | | | these assays are publicly available (e.g., through the ATCC) and/or may be routinely generated. |
| | | | | Exemplary pancreatic cells that may be used according to these assays include rat INS-1 cells. INS-1 |
| | | | | cells are a semi-adherent cell line established from cells isolated from an X-ray induced rat transplantable |
| | | | | insulinoma. These cells retain characteristics typical of native pancreatic beta cells including glucose |
| | | | | inducible insulin secretion. References: Asfari et al. Endocrinology 1992 130: 167. |
| 55 | HEPAB80 | 354 | Activation of | Kinase assay. Kinase assays, for example an Elk-1 kinase assay, for ERK signal transduction that |
| | | | Adipocyte ERK | regulate cell proliferation or differentiation are well known in the art and may be used or routinely |
| | | | Signaling | modified to assess the ability of polypeptides of the invention (including antibodies and agonists or |
| | | | Pathway | antagonists of the invention) to promote or inhibit cell proliferation, activation, and differentiation. |
| | | | | Exemplary assays for ERK kinase activity that may be used or routinely modified to test ERK kinase- |
| | | | | induced activity of polypeptides of the invention (including antibodies and agonists or antagonists of the |
| | | | | invention) include the assays disclosed in Forrer et al., Biol Chem 379(8-9): 1101-1110 (1998); Le |
| | | | | Marchand-Brustel Y, Exp Clin Endocrinol Diabetes 107(2): 126-132 (1999); Kyriakis JM, Biochem Soc |
| | | | | Symp 64: 29-48 (1999); Chang and Karin, Nature 410(6824): 37-40 (2001); and Cobb MH, Prog Biophys |
| | | | | Mol Biol 71(3-4): 479-500 (1999); the contents of each of which are herein incorporated by reference in |
| | | | | its entirety. Mouse adipocyte cells that may be used according to these assays are publicly available |
| | | | | (e.g., through the ATCC). Exemplary mouse adipocyte cells that may be used according to these assays |
| | | | | include 3T3-L1 cells. 3T3-L1 is an adherent mouse preadipocyte cell line that is a continuous substrain |
| | | | | of 3T3 fibroblast cells developed through clonal isolation and undergo a pre-adipocyte to adipose-like |
| | | | | conversion under appropriate differentiation conditions known in the art. |
| 55 | HEPAB80 | 354 | Regulation of | Assays for the regulation of viability and proliferation of cells in vitro are well-known in the art and may |
| | | | viability and | be used or routinely modified to assess the ability of polypeptides of the invention (including antibodies |
| | | | proliferation of | and agonists or antagonists of the invention) to regulate viability and proliferation of pancreatic beta |
| | | | pancreatic beta | cells. For example, the Cell Titer-Glo luminescent cell viability assay measures the number of viable |
| | | | cells. | cells in culture based on quantitation of the ATP present which signals the presence of metabolically |
| | | | | active cells. Exemplary assays that may be used or routinely modified to test regulation of viability and |
| | | | | proliferation of pancreatic beta cells by polypeptides of the invention (including antibodies and agonists |
| | | | | or antagonists of the invention) include assays disclosed in: Ohtani KI, et al., Endocrinology, 139(1): 172-8 |
| | | | | (1998); Krautheim A, et al, Exp Clin Endocrinol Diabetes, 107 (1): 29-34 (1999), the contents of each |
| | | | | of which is herein incorporated by reference in its entirety. Pancreatic cells that may be used according |
| | | | | to these assays are publicly available (e.g., through the ATCC) and/or may be routinely generated. |
| | | | | Exemplary pancreatic cells that may be used according to these assays include HITT15 Cells. HITT15 |
| | | | | are an adherent epithelial cell line established from Syrian hamster islet cells transformed with SV40. |
| | | | | These cells express glucagon, somatostatin, and glucocorticoid receptors. The cells secrete insulin, |
| | | | | which is stimulated by glucose and glucagon and suppressed by somatostatin or glucocorticoids. ATTC# |
| | | | | CRL-1777 Refs: Lord and Ashcroft. Biochem. J. 219: 547-551; Santerre et al. Proc. Natl. Acad. Sci. |
| | | | | USA 78: 4339-4343, 1981. |
| 56 | HFABH95 | 355 | Stimulation of | Assays for measuring secretion of insulin are well-known in the art and may be used or routinely |
| | | | insulin secretion | modified to assess the ability of polypeptides of the invention (including antibodies and agonists or |
| | | | from pancreatic | antagonists of the invention) to stimulate insulin secretion. For example, insulin secretion is measured by |
| | | | beta cells. | FMAT using anti-rat insulin antibodies. Insulin secretion from pancreatic beta cells is upregulated by |
| | | | | glucose and also by certain proteins/peptides, and disregulation is a key component in diabetes. |
| | | | | Exemplary assays that may be used or routinely modified to test for stimulation of insulin secretion (from |
| | | | | pancreatic cells) by polypeptides of the invention (including antibodies and agonists or antagonists of the |
| | | | | invention) include assays disclosed in: Ahren, B., et al., Am J Physiol, 277(4 Pt 2): R959-66 (1999); Li, M., |
| | | | | et al., Endocrinology, 138(9): 3735-40 (1997); Kim, K. H., et al., FEBS Lett, 377(2): 237-9 (1995); |
| | | | | and, Miraglia S et. al., Journal of Biomolecular Screening, 4: 193-204 (1999), the contents of each of |
| | | | | which is herein incorporated by reference in its entirety. Pancreatic cells that may be used according to |
| | | | | these assays are publicly available (e.g., through the ATCC) and/or may be routinely generated. |
| | | | | Exemplary pancreatic cells that may be used according to these assays include rat INS-1 cells. INS-1 |
| | | | | cells are a semi-adherent cell line established from cells isolated from an X-ray induced rat transplantable |
| | | | | insulinoma. These cells retain characteristics typical of native pancreatic beta cells including glucose |
| | | | | inducible insulin secretion. References: Asfari et al. Endocrinology 1992 130: 167. |
| 56 | HFABH95 | 355 | Upregulation of | CD69 FMAT. CD69 is an activation marker that is expressed on activated T cells, B cells, and NK cells. |
| | | | CD69 and | CD69 is not expressed on resting T cells, B cells, or NK cells. CD69 has been found to be associated with |
| | | | activation of T | inflammation. Assays for immunomodulatory proteins expressed in T cells, B cells, and leukocytes are |
| | | | cells | well known in the art and may be used or routinely modified to assess the ability of polypeptides of the |
| | | | | invention (including antibodies and agonists or antagonists of the invention) to modulate the activation of |
| | | | | T cells, and/or mediate humoral or cell-mediated immunity. Exemplary assays that test for |
| | | | | immunomodulatory proteins evaluate the upregulation of cell surface markers, such as CD69, and the |
| | | | | activation of T cells. Such assays that may be used or routinely modified to test immunomodulatory |
| | | | | activity of polypeptides of the invention (including antibodies and agonists or antagonists of the |
| | | | | invention) include, for example, the assays disclosed in Miraglia et al., J Biomolecular Screening 4: 193-204 |
| | | | | (1999); Rowland et al., “Lymphocytes: a practical approach” Chapter 6: 138-160 (2000); Ferenczi et |
| | | | | al., J Autoimmun 14(1): 63-78 (200); Werfel et al., Allergy 52(4): 465-469 (1997); Taylor-Fishwick and |
| | | | | Siegel, Eur 3 Immunol 25(12): 3215-3221 (1995); and Afetra et al., Ann Rheum Dis 52(6): 457-460 |
| | | | | (1993), the contents of each of which are herein incorporated by reference in its entirety. Human T cells |
| | | | | that may be used according to these assays may be isolated using techniques disclosed herein or |
| | | | | otherwise known in the art. Human T cells are primary human lymphocytes that mature in the thymus |
| | | | | and express a T Cell receptor and CD3, CD4, or CD8. These cells mediate humoral or cell-mediated |
| | | | | immunity and may be preactivated to enhance responsiveness to immunomodulatory factors. |
| 57 | HFAEF57 | 356 | Regulation of | Assays for the regulation of transcription through the FAS promoter element are well-known in the art |
| | | | transcription | and may be used or routinely modified to assess the ability of polypeptides of the invention (including |
| | | | through the FAS | antibodies and agonists or antagonists of the invention) to activate the FAS promoter element in a |
| | | | promoter | reporter construct and to regulate transcription of FAS, a key enzyme for lipogenesis. FAS promoter is |
| | | | element in | regulated by many transcription factors including SREBP. Insulin increases FAS gene transcription in |
| | | | hepatocytes | livers of diabetic mice. This stimulation of transcription is also somewhat glucose dependent. |
| | | | | Exemplary assays that may be used or routinely modified to test for FAS promoter element activity (in |
| | | | | hepatocytes) by polypeptides of the invention (including antibodies and agonists or antagonists of the |
| | | | | invention) include assays disclosed in Xiong, S., et al., Proc Natl Acad Sci U.S.A., 97(8): 3948-53 (2000); |
| | | | | Roder, K., et al., Eur J Biochem, 260(3): 743-51 (1999); Oskouian B, et al., Biochem J, 317 (Pt 1): 257-65 |
| | | | | (1996); Berger, et al., Gene 66: 1-10 (1988); and, Cullen, B., et al., Methods in Enzymol. 216: 362-368 |
| | | | | (1992), the contents of each of which is herein incorporated by reference in its entirety. Hepatocytes that |
| | | | | may be used according to these assays, such as H4IIE cells, are publicly available (e.g., through the |
| | | | | ATCC) and/or may be routinely generated. Exemplary hepatocytes that may be used according to these |
| | | | | assays include rat liver hepatoma cell line(s) inducible with glucocorticoids, insulin, or cAMP |
| | | | | derivatives. |
| 58 | HFCEB37 | 357 | Regulation of | Assays for the regulation of transcription of Malic Enzyme are well-known in the art and may be used or |
| | | | transcription of | routinely modified to assess the ability of polypeptides of the invention (including antibodies and |
| | | | Malic Enzyme | agonists or antagonists of the invention) to regulate transcription of Malic Enzyme, a key enzyme in |
| | | | in adipocytes | lipogenesis. Malic enzyme is involved in lipogenesisand its expression is stimulted by insulin. ME |
| | | | | promoter contains two direct repeat (DR1)- like elements MEp and MEd identified as putative PPAR |
| | | | | response elements. ME promoter may also responds to AP1 and other transcription factors. Exemplary |
| | | | | assays that may be used or routinely modified to test for regulation of transcription of Malic Enzyme (in |
| | | | | adipoocytes) by polypeptides of the invention (including antibodies and agonists or antagonists of the |
| | | | | invention) include assays disclosed in: Streeper, R. S., et al., Mol Endocrinol, 12(11): 1778-91 (1998); |
| | | | | Garcia-Jimenez, C., et al., Mol Endocrinol, 8(10): 1361-9 (1994); Barroso, I., et al., J Biol Chem, |
| | | | | 274(25): 17997-8004 (1999); Ijpenberg, A., et al., J Biol Chem, 272(32): 20108-20117 (1997); Berger, et |
| | | | | al., Gene 66: 1-10 (1988); and, Cullen, B., et al., Methods in Enzymol. 216: 362-368 (1992), the contents |
| | | | | of each of which is herein incorporated by reference in its entirety. Hepatocytes that may be used |
| | | | | according to these assays are publicly available (e.g., through the ATCC) and/or may be routinely |
| | | | | generated. Exemplary hepatocytes that may be used according to these assays includes the H4IIE rat |
| | | | | liver hepatoma cell line. |
| 59 | HFFAD59 | 358 | Regulation of | Assays for the regulation of transcription through the DMEF1 response element are well-known in the art |
| | | | transcription via | and may be used or routinely modified to assess the ability of polypeptides of the invention (including |
| | | | DMEF1 | antibodies and agonists or antagonists of the invention) to activate the DMEF1 response element in a |
| | | | response | reporter construct (such as that containing the GLUT4 promoter) and to regulate insulin production. The |
| | | | element in | DMEF1 response element is present in the GLUT4 promoter and binds to MEF2 transcription factor and |
| | | | adipocytes and | another transcription factor that is required for insulin regulation of Glut4 expression in skeletal muscle. |
| | | | pre-adipocytes | GLUT4 is the primary insulin-responsive glucose transporter in fat and muscle tissue. Exemplary assays |
| | | | | that may be used or routinely modified to test for DMEF1 response element activity (in adipocytes and |
| | | | | pre-adipocytes) by polypeptides of the invention (including antibodies and agonists or antagonists of the |
| | | | | invention) include assays disclosed inThai, M. V., et al., J Biol Chem, 273(23): 14285-92 (1998); Mora, S., |
| | | | | et al., J Biol Chem, 275(21): 16323-8 (2000); Liu, M. L., et al., J Biol Chem, 269(45): 28514-21 (1994); |
| | | | | “Identification of a 30-base pair regulatory element and novel DNA binding protein that regulates the |
| | | | | human GLUT4 promoter in transgenic mice”, J Biol Chem. 2000 Aug 4; 275(31): 23666-73; Berger, et al., |
| | | | | Gene 66: 1-10 (1988); and, Cullen, B., et al., Methods in Enzymol. 216: 362-368 (1992), the contents of |
| | | | | each of which is herein incorporated by reference in its entirety. Adipocytes and pre-adipocytes that may |
| | | | | be used according to these assays are publicly available (e.g., through the ATCC) and/or may be |
| | | | | routinely generated. Exemplary cells that may be used according to these assays include the mouse 3T3- |
| | | | | L1 cell line which is an adherent mouse preadipocyte cell line. Mouse 3T3-L1 cells are a continuous |
| | | | | substrain of 3T3 fibroblasts developed through clonal isolation. These cells undergo a pre-adipocyte to |
| | | | | adipose-like conversion under appropriate differentiation culture conditions. |
| 59 | HFFAD59 | 358 | Activation of | Assays for the activation of transcription through the AP1 response element are known in the art and may |
| | | | transcription | be used or routinely modified to assess the ability of polypeptides of the invention (including antibodies |
| | | | through AP1 | and agonists or antagonists of the invention) to modulate growth and other cell functions. Exemplary |
| | | | response | assays for transcription through the AP1 response element that may be used or routinely modified to test |
| | | | element in | AP1-response element activity of polypeptides of the invention (including antibodies and agonists or |
| | | | immune cells | antagonists of the invention) include assays disclosed in Berger et al., Gene 66: 1-10 (1988); Cullen and |
| | | | (such as T- | Malm, Methods in Enzymol 216: 362-368 (1992); Henthorn et al., Proc Natl Acad Sci USA 85: 6342-6346 |
| | | | cells). | (1988); Rellahan et al., J Biol Chem 272(49): 30806-30811 (1997); Chang et al., Mol Cell Biol |
| | | | | 18(9): 4986-4993 (1998); and Fraser et al., Eur J Immunol 29(3): 838-844 (1999), the contents of each of |
| | | | | which are herein incorporated by reference in its entirety. T cells that may be used according to these |
| | | | | assays are publicly available (e.g., through the ATCC). Exemplary mouse T cells that may be used |
| | | | | according to these assays include the CTLL cell line, which is an IL-2 dependent suspension-culture cell |
| | | | | line with cytotoxic activity. |
| 59 | HFFAD59 | 358 | Activation of | Assays for the activation of transcription through the Serum Response Element (SRE) are well-known in |
| | | | transcription | the art and may be used or routinely modified to assess the ability of polypeptides of the invention |
| | | | through serum | (including antibodies and agonists or antagonists of the invention) to regulate the serum response factors |
| | | | response | and modulate the expression of genes involved in growth. Exemplary assays for transcription through |
| | | | element in | the SRE that may be used or routinely modified to test SRE activity of the polypeptides of the invention |
| | | | immune cells | (including antibodies and agonists or antagonists of the invention) include assays disclosed in Berger et |
| | | | (such as T- | al., Gene 66: 1-10 (1998); Cullen and Malm, Methods in Enzymol 216: 362-368 (1992); Henthorn et al., |
| | | | cells). | Proc Natl Acad Sci USA 85: 6342-6346 (1988); and Black et al., Virus Genes 12(2): 105-117 (1997), the |
| | | | | content of each of which are herein incorporated by reference in its entirety. T cells that may be used |
| | | | | according to these assays are publicly available (e.g., through the ATCC). Exemplary mouse T cells that |
| | | | | may be used according to these assays include the CTLL cell line, which is an IL-2 dependent suspension |
| | | | | culture of T cells with cytotoxic activity. |
| 60 | HFGAD82 | 359 | Activation of | Assays for the activation of transcription through the AP1 response element are known in the art and may |
| | | | transcription | be used or routinely modified to assess the ability of polypeptides of the invention (including antibodies |
| | | | through AP1 | and agonists or antagonists of the invention) to modulate growth and other cell functions. Exemplary |
| | | | response | assays for transcription through the AP1 response element that may be used or routinely modified to test |
| | | | element in | AP1-response element activity of polypeptides of the invention (including antibodies and agonists or |
| | | | immune cells | antagonists of the invention) include assays disclosed in Berger et al., Gene 66: 1-10 (1988); Cullen and |
| | | | (such as T-cells). | Malm, Methods in Enzymol 216: 362-368 (1992); Henthorn et al., Proc Natl Acad Sci USA 85: 6342-6346 |
| | | | | (1988); Rellahan et al., J Biol Chem 272(49): 30806-30811 (1997); Chang et al., Mol Cell Biol |
| | | | | 18(9): 4986-4993 (1998); and Fraser et al., Eur J Immunol 29(3): 838-844 (1999), the contents of each of |
| | | | | which are herein incorporated by reference in its entirety. Mouse T cells that may be used according to |
| | | | | these assays are publicly available (e.g., through the ATCC). Exemplary mouse T cells that may be used |
| | | | | according to these assays include the HT2 cell line, which is an IL-2 dependent suspension culture cell line that also |
| | | | | responds to IL-4. |
| 60 | HFGAD82 | 359 | Stimulation of | Assays for measuring secretion of insulin are well-known in the art and may be used or routinely |
| | | | insulin secretion | modified to assess the ability of polypeptides of the invention (including antibodies and agonists or |
| | | | from pancreatic | antagonists of the invention) to stimulate insulin secretion. For example, insulin secretion is measured by |
| | | | beta cells. | FMAT using anti-rat insulin antibodies. Insulin secretion from pancreatic beta cells is upregulated by |
| | | | | glucose and also by certain proteins/peptides, and disregulation is a key component in diabetes. |
| | | | | Exemplary assays that may be used or routinely modified to test for stimulation of insulin secretion (from |
| | | | | pancreatic cells) by polypeptides of the invention (including antibodies and agonists or antagonists of the |
| | | | | invention) include assays disclosed in: Ahren, B., et al., Am J Physiol, 277(4 Pt 2): R959-66 (1999); Li, M., |
| | | | | et al., Endocrinology, 138(9): 3735-40 (1997); Kim, K. H., et al., FEBS Lett, 377(2): 237-9 (1995); |
| | | | | and, Miraglia S et. al., Journal of Biomolecular Screening, 4: 193-204 (1999), the contents of each of |
| | | | | which is herein incorporated by reference in its entirety. Pancreatic cells that may be used according to |
| | | | | these assays are publicly available (e.g., through the ATCC) and/or may be routinely generated. |
| | | | | Exemplary pancreatic cells that may be used according to these assays include rat INS-1 cells. INS-1 |
| | | | | cells are a semi-adherent cell line established from cells isolated from an X-ray induced rat transplantable |
| | | | | insulinoma. These cells retain characteristics typical of native pancreatic beta cells including glucose |
| | | | | inducible insulin secretion. References: Asfari et al. Endocrinology 1992 130: 167. |
| 61 | HFIUR10 | 360 | Regulation of | Assays for the regulation of viability and proliferation of cells in vitro are well-known in the art and may |
| | | | viability and | be used or routinely modified to assess the ability of polypeptides of the invention (including antibodies |
| | | | proliferation of | and agonists or antagonists of the invention) to regulate viability and proliferation of pancreatic beta |
| | | | pancreatic beta | cells. For example, the Cell Titer-Glo luminescent cell viability assay measures the number of viable |
| | | | cells. | cells in culture based on quantitation of the ATP present which signals the presence of metabolically |
| | | | | active cells. Exemplary assays that may be used or routinely modified to test regulation of viability and |
| | | | | proliferation of pancreatic beta cells by polypeptides of the invention (including antibodies and agonists |
| | | | | or antagonists of the invention) include assays disclosed in: Ohtani KI, et al., Endocrinology, 139(1): 172-8 |
| | | | | (1998); Krautheim A, et al, Exp Clin Endocrinol Diabetes, 107 (1): 29-34 (1999), the contents of each |
| | | | | of which is herein incorporated by reference in its entirety. Pancreatic cells that may be used according |
| | | | | to these assays are publicly available (e.g., through the ATCC) and/or may be routinely generated. |
| | | | | Exemplary pancreatic cells that may be used according to these assays include HITT15 Cells. HITT15 |
| | | | | are an adherent epithelial cell line established from Syrian hamster islet cells transformed with SV40. |
| | | | | These cells express glucagon, somatostatin, and glucocorticoid receptors. The cells secrete insulin, |
| | | | | which is stimulated by glucose and glucagon and suppressed by somatostatin or glucocorticoids. ATTC# |
| | | | | CRL-1777 Refs: Lord and Ashcroft. Biochem. J. 219: 547-551; Santerre et al. Proc. Natl. Acad. Sci. USA 78: 4339-4343, |
| | | | | 1981. |
| 62 | HFTBM50 | 361 | Insulin | Assays for measuring secretion of insulin are well-known in the art and may be used or routinely |
| | | | Secretion | modified to assess the ability of polypeptides of the invention (including antibodies and agonists or |
| | | | | antagonists of the invention) to stimulate insulin secretion. For example, insulin secretion is measured by |
| | | | | FMAT using anti-rat insulin antibodies. Insulin secretion from pancreatic beta cells is upregulated by |
| | | | | glucose and also by certain proteins/peptides, and disregulation is a key component in diabetes. |
| | | | | Exemplary assays that may be used or routinely modified to test for stimulation of insulin secretion (from |
| | | | | pancreatic cells) by polypeptides of the invention (including antibodies and agonists or antagonists of the |
| | | | | invention) include assays disclosed in: Shimizu, H., et al., Endocr J, 47(3): 261-9 (2000); Salapatek, A. M., |
| | | | | et al., Mol Endocrinol, 13(8): 1305-17 (1999); Filipsson, K., et al., Ann N Y Acad Sci, 865: 441-4 |
| | | | | (1998); Olson, L. K., et al., J Biol Chem, 271(28): 16544-52 (1996); and, Miraglia S et. al., Journal of |
| | | | | Biomolecular Screening, 4: 193-204 (1999), the contents of each of which is herein incorporated by |
| | | | | reference in its entirety. Pancreatic cells that may be used according to these assays are publicly |
| | | | | available (e.g., through the ATCC) and/or may be routinely generated. Exemplary pancreatic cells that |
| | | | | may be used according to these assays include HITT15 Cells. HITT15 are an adherent epithelial cell line |
| | | | | established from Syrian hamster islet cells transformed with SV40. These cells express glucagon, |
| | | | | somatostatin, and glucocorticoid receptors. The cells secrete insulin, which is stimulated by glucose and |
| | | | | glucagon and suppressed by somatostatin or glucocorticoids. ATTC# CRL-1777 Refs: Lord and |
| | | | | Ashcroft. Biochem. J. 219: 547-551; Santerre et al. Proc. Natl. Acad. Sci. USA 78: 4339-4343, 1981. |
| 62 | HFTBM50 | 361 | Production of | Assays for production of IL-10 and activation of T-cells are well known in the art and may be used or |
| | | | IL-10 and | routinely modified to assess the ability of polypeptides of the invention (including antibodies and |
| | | | activation of T-cells. | agonists or antagonists of the invention) to stimulate or inhibit production of IL-10 and/or activation of |
| | | | | T-cells. Exemplary assays that may be used or routinely modified to assess the ability of polypeptides |
| | | | | and antibodies of the invention (including agonists or antagonists of the invention) to modulate IL-10 |
| | | | | production and/or T-cell proliferation include, for example, assays such as disclosed and/or cited in: |
| | | | | Robinson, DS, et al., “Th-2 cytokines in allergic disease” Br Med Bull; 56 (4): 956-968 (2000), and |
| | | | | Cohn, et al., “T-helper type 2 cell-directed therapy for asthma” Pharmacology & Therapeutics; 88: 187-196 |
| | | | | (2000); the contents of each of which are herein incorporated by reference in their entirety. |
| | | | | Exemplary cells that may be used according to these assays include Th2 cells. IL10 secreted from Th2 |
| | | | | cells may be measured as a marker of Th2 cell activation. Th2 cells are a class of T cells that secrete |
| | | | | IL4, IL10, IL13, IL5 and IL6. Factors that induce differentiation and activation of Th2 cells play a |
| | | | | major role in the initiation and pathogenesis of allergy and asthma. Primary T helper 2 cells are |
| | | | | generated via in vitro culture under Th2 polarizing conditions using peripheral blood lymphocytes isolated from |
| | | | | cord blood. |
| 63 | HFTDZ36 | 362 | Protection from | Caspase Apoptosis Rescue. Assays for caspase apoptosis rescue are well known in the art and may be |
| | | | Endothelial Cell | used or routinely modified to assess the ability of the polypeptides of the invention (including antibodies |
| | | | Apoptosis. | and agonists or antagonists of the invention) to inhibit caspase protease-mediated apoptosis. Exemplary |
| | | | | assays for caspase apoptosis that may be used or routinely modified to test caspase apoptosis rescue of |
| | | | | polypeptides of the invention (including antibodies and agonists or antagonists of the invention) include |
| | | | | the assays disclosed in Romeo et al., Cardiovasc Res 45(3): 788-794 (2000); Messmer et al., Br J |
| | | | | Pharmacol 127(7): 1633-1640 (1999); and J Atheroscler Thromb 3(2): 75-80 (1996); the contents of each |
| | | | | of which are herein incorporated by reference in its entirety. Endothelial cells that may be used |
| | | | | according to these assays are publicly available (e.g., through commercial sources). Exemplary |
| | | | | endothelial cells that may be used according to these assays include bovine aortic endothelial cells |
| | | | | (bAEC), which are an example of endothelial cells which line blood vessels and are involved in functions |
| | | | | that include, but are not limited to, angiogenesis, vascular permeability, vascular tone, and immune cell |
| | | | | extravasation. |
| 63 | HFTDZ36 | 362 | Stimulation of | Assays for measuring secretion of insulin are well-known in the art and may be used or routinely |
| | | | insulin secretion | modified to assess the ability of polypeptides of the invention (including antibodies and agonists or |
| | | | from pancreatic | antagonists of the invention) to stimulate insulin secretion. For example, insulin secretion is measured by |
| | | | beta cells. | FMAT using anti-rat insulin antibodies. Insulin secretion from pancreatic beta cells is upregulated by |
| | | | | glucose and also by certain proteins/peptides, and disregulation is a key component in diabetes. |
| | | | | Exemplary assays that may be used or routinely modified to test for stimulation of insulin secretion (from |
| | | | | pancreatic cells) by polypeptides of the invention (including antibodies and agonists or antagonists of the |
| | | | | invention) include assays disclosed in: Ahren, B., et al., Am J Physiol, 277(4 Pt 2): R959-66 (1999); Li, M., |
| | | | | et al., Endocrinology, 138(9): 3735-40 (1997); Kim, K. H., et al., FEBS Lett, 377(2): 237-9 (1995); |
| | | | | and, Miraglia S et. al., Journal of Biomolecular Screening, 4: 193-204 (1999), the contents of each of |
| | | | | which is herein incorporated by reference in its entirety. Pancreatic cells that may be used according to |
| | | | | these assays are publicly available (e.g., through the ATCC) and/or may be routinely generated. |
| | | | | Exemplary pancreatic cells that may be used according to these assays include rat INS-1 cells. INS-1 |
| | | | | cells are a semi-adherent cell line established from cells isolated from an X-ray induced rat transplantable |
| | | | | insulinoma. These cells retain characteristics typical of native pancreatic beta cells including glucose |
| | | | | inducible insulin secretion. References: Asfari et al. Endocrinology 1992 130:167. |
| 64 | HFXBL33 | 363 | Regulation of | Assays for the regulation of transcription through the DMEF1 response element are well-known in the art |
| | | | transcription via | and may be used or routinely modified to assess the ability of polypeptides of the invention (including |
| | | | DMEF1 | antibodies and agonists or antagonists of the invention) to activate the DMEF1 response element in a |
| | | | response | reporter construct (such as that containing the GLUT4 promoter) and to regulate insulin production. The |
| | | | element in | DMEF1 response element is present in the GLUT4 promoter and binds to MEF2 transcription factor and |
| | | | adipocytes and | another transcription factor that is required for insulin regulation of Glut4 expression in skeletal muscle. |
| | | | pre-adipocytes | GLUT4 is the primary insulin-responsive glucose transporter in fat and muscle tissue. Exemplary assays |
| | | | | that may be used or routinely modified to test for DMEF1 response element activity (in adipocytes and |
| | | | | pre-adipocytes) by polypeptides of the invention (including antibodies and agonists or antagonists of the |
| | | | | invention) include assays disclosed inThai, M. V., et al., J Biol Chem, 273(23): 14285-92 (1998); Mora, S., |
| | | | | et al., J Biol Chem, 275(21): 16323-8 (2000); Liu, M. L., et al., J Biol Chem, 269(45): 28514-21 (1994); |
| | | | | “Identification of a 30-base pair regulatory element and novel DNA binding protein that regulates the |
| | | | | human GLUT4 promoter in transgenic mice”, J Biol Chem. 2000 Aug 4; 275(31): 23666-73; Berger, et al., |
| | | | | Gene 66: 1-10 (1988); and, Cullen, B., et al., Methods in Enzymol. 216: 362-368 (1992), the contents of |
| | | | | each of which is herein incorporated by reference in its entirety. Adipocytes and pre-adipocytes that may |
| | | | | be used according to these assays are publicly available (e.g., through the ATCC) and/or may be |
| | | | | routinely generated. Exemplary cells that may be used according to these assays include the mouse 3T3- |
| | | | | L1 cell line which is an adherent mouse preadipocyte cell line. Mouse 3T3-L1 cells are a continuous |
| | | | | substrain of 3T3 fibroblasts developed through clonal isolation. These cells undergo a pre-adipocyte to |
| | | | | adipose-like conversion under appropriate differentiation culture conditions. |
| 65 | HFXJX44 | 364 | Stimulation of | Assays for measuring secretion of insulin are well-known in the art and may be used or routinely |
| | | | insulin secretion | modified to assess the ability of polypeptides of the invention (including antibodies and agonists or |
| | | | from pancreatic | antagonists of the invention) to stimulate insulin secretion. For example, insulin secretion is measured by |
| | | | beta cells. | FMAT using anti-rat insulin antibodies. Insulin secretion from pancreatic beta cells is upregulated by |
| | | | | glucose and also by certain proteins/peptides, and disregulation is a key component in diabetes. |
| | | | | Exemplary assays that may be used or routinely modified to test for stimulation of insulin secretion (from |
| | | | | pancreatic cells) by polypeptides of the invention (including antibodies and agonists or antagonists of the |
| | | | | invention) include assays disclosed in: Ahren, B., et al., Am J Physiol, 277(4 Pt 2): R959-66 (1999); Li, M., |
| | | | | et al., Endocrinology, 138(9): 3735-40 (1997); Kim, K. H., et al., FEBS Lett, 377(2): 237-9 (1995); |
| | | | | and, Miraglia S et. al., Journal of Biomolecular Screening, 4: 193-204 (1999), the contents of each of |
| | | | | which is herein incorporated by reference in its entirety. Pancreatic cells that may be used according to |
| | | | | these assays are publicly available (e.g., through the ATCC) and/or may be routinely generated. |
| | | | | Exemplary pancreatic cells that may be used according to these assays include rat INS-1 cells. INS-1 |
| | | | | cells are a semi-adherent cell line established from cells isolated from an X-ray induced rat transplantable |
| | | | | insulinoma. These cells retain characteristics typical of native pancreatic beta cells including glucose |
| | | | | inducible insulin secretion. References: Asfari et al. Endocrinology 1992 130: 167. |
| 66 | HFXKT05 | 365 | Myoblast cell | Assays for muscle cell proliferation are well known in the art and may be used or routinely modified to |
| | | | proliferation | assess the ability of polypeptides of the invention (including antibodies and agonists or antagonists of the |
| | | | | invention) to stimulate or inhibit myoblast cell proliferation. Exemplary assays for myoblast cell |
| | | | | proliferation that may be used or routinely modified to test activity of polypeptides and antibodies of the |
| | | | | invention (including agonists or antagonists of the invention) include, for example, assays disclosed in: |
| | | | | Soeta, C., et al. “Possible role for the c-ski gene in the proliferation of myogenic cells in regenerating |
| | | | | skeletal muscles of rats” Dev Growth Differ Apr; 43(2): 155-64 (2001); Ewton DZ, et al., “IGF binding |
| | | | | proteins-4, -5 and -6 may play specialized roles during L6 myoblast proliferation and differentiation” J |
| | | | | Endocrinol Mar; 144(3): 539-53 (1995); and, Pampusch MS, et al., “Effect of transforming growth factor |
| | | | | beta on proliferation of L6 and embryonic porcine myogenic cells” J Cell Physiol Jun; 143(3): 524-8 |
| | | | | (1990); the contents of each of which are herein incorporated by reference in their entirety. Exemplary |
| | | | | myoblast cells that may be used according to these assays include the rat myoblast L6 cell line. Rat |
| | | | | myoblast L6 cells are an adherent rat myoblast cell line, isolated from primary cultures of rat thigh |
| | | | | muscle, that fuse to form multinucleated myotubes and striated fibers after culture in differentiation |
| | | | | media. |
| 67 | HGBHI35 | 366 | Stimulation of | Assays for measuring secretion of insulin are well-known in the art and may be used or routinely |
| | | | insulin secretion | modified to assess the ability of polypeptides of the invention (including antibodies and agonists or |
| | | | from pancreatic | antagonists of the invention) to stimulate insulin secretion. For example, insulin secretion is measured by |
| | | | beta cells. | FMAT using anti-rat insulin antibodies. Insulin secretion from pancreatic beta cells is upregulated by |
| | | | | glucose and also by certain proteins/peptides, and disregulation is a key component in diabetes. |
| | | | | Exemplary assays that may be used or routinely modified to test for stimulation of insulin secretion (from |
| | | | | pancreatic cells) by polypeptides of the invention (including antibodies and agonists or antagonists of the |
| | | | | invention) include assays disclosed in: Ahren, B., et al., Am J Physiol, 277(4 Pt 2): R959-66 (1999); Li, M., |
| | | | | et al., Endocrinology, 138(9): 3735-40 (1997); Kim, K. H., et al., FEBS Lett, 377(2): 237-9 (1995); |
| | | | | and, Miraglia S et. al., Journal of Biomolecular Screening, 4: 193-204 (1999), the contents of each of |
| | | | | which is herein incorporated by reference in its entirety. Pancreatic cells that may be used according to |
| | | | | these assays are publicly available (e.g., through the ATCC) and/or may be routinely generated. |
| | | | | Exemplary pancreatic cells that may be used according to these assays include rat INS-1 cells. INS-1 |
| | | | | cells are a semi-adherent cell line established from cells isolated from an X-ray induced rat transplantable |
| | | | | insulinoma. These cells retain characteristics typical of native pancreatic beta cells including glucose |
| | | | | inducible insulin secretion. References: Asfari et al. Endocrinology 1992 130: 167. |
| 68 | HGLAF75 | 367 | Regulation of | Assays for the regulation of transcription of Malic Enzyme are well-known in the art and may be used or |
| | | | transcription of | routinely modified to assess the ability of polypeptides of the invention (including antibodies and |
| | | | Malic Enzyme | agonists or antagonists of the invention) to regulate transcription of Malic Enzyme, a key enzyme in |
| | | | in hepatocytes | lipogenesis. Malic enzyme is involved in lipogenesisand its expression is stimulted by insulin. ME |
| | | | | promoter contains two direct repeat (DR1)-like elements MEp and MEd identified as putative PPAR |
| | | | | response elements. ME promoter may also responds to AP1 and other transcription factors. Exemplary |
| | | | | assays that may be used or routinely modified to test for regulation of transcription of Malic Enzyme (in |
| | | | | hepatocytes) by polypeptides of the invention (including antibodies and agonists or antagonists of the |
| | | | | invention) include assays disclosed in: Streeper, R. S., et al., Mol Endocrinol, 12(11): 1778-91 (1998); |
| | | | | Garcia-Jimenez, C., et al., Mol Endocrinol, 8(10): 1361-9 (1994); Barroso, I., et al., J Biol Chem, |
| | | | | 274(25): 17997-8004 (1999); Ijpenberg, A., et al., J Biol Chem, 272(32): 20108-20117 (1997); Berger, et |
| | | | | al., Gene 66: 1-10 (1988); and, Cullen, B., et al., Methods in Enzymol. 216: 362-368 (1992), the contents |
| | | | | of each of which is herein incorporated by reference in its entirety. Hepatocytes that may be used |
| | | | | according to these assays are publicly available (e.g., through the ATCC) and/or may be routinely |
| | | | | generated. Exemplary hepatocytes that may be used according to these assays includes the mouse 3T3- |
| | | | | L1 cell line. 3T3-L1 is a mouse preadipocyte cell line (adherent). It is a continuous substrain of 3T3 |
| | | | | fibroblasts developed through clonal isolation. Cells undergo a pre-adipocyte to adipose-like conversion |
| | | | | under appropriate differentiation culture conditions. |
| 68 | HGLAF75 | 367 | Regulation of | Assays for the regulation of viability and proliferation of cells in vitro are well-known in the art and may |
| | | | viability and | be used or routinely modified to assess the ability of polypeptides of the invention including antibodies |
| | | | proliferation of | and agonists or antagonists of the invention) to regulate viability and proliferation of pancreatic beta |
| | | | pancreatic beta | cells. For example, the Cell Titer-Glo luminescent cell viability assay measures the number of viable |
| | | | cells. | cells in culture based on quantitation of the ATP present which signals the presence of metabolically |
| | | | | active cells. Exemplary assays that may be used or routinely modified to test regulation of viability and |
| | | | | proliferation of pancreatic beta cells by polypeptides of the invention (including antibodies and agonists |
| | | | | or antagonists of the invention) include assays disclosed in: Friedrichsen BN, et al., Mol Endocrinol, |
| | | | | 15(1): 136-48 (2001); Huotari MA, et al., Endocrinology, 139(4): 1494-9 (1998); Hugl SR, et al., J Biol |
| | | | | Chem 1998 Jul 10; 273(28): 17771-9 (1998), the contents of each of which is herein incorporated by |
| | | | | reference in its entirety. Pancreatic cells that may be used according to these assays are publicly |
| | | | | available (e.g., through the ATCC) and/or may be routinely generated. Exemplary pancreatic cells that |
| | | | | may be used according to these assays include rat INS-1 cells. INS-1 cells are a semi-adherent cell line |
| | | | | established from cells isolated from an X-ray induced rat transplantable insulinoma. These cells retain |
| | | | | characteristics typical of native pancreatic beta cells including glucose inducible insulin secretion. |
| | | | | References: Asfari et al. Endocrinology 1992 130: 167. |
| 68 | HGLAF75 | 367 | Insulin | Assays for measuring secretion of insulin are well-known in the art and may be used or routinely |
| | | | Secretion | modified to assess the ability of polypeptides of the invention (including antibodies and agonists or |
| | | | | antagonists of the invention) to stimulate insulin secretion. For example, insulin secretion is measured by |
| | | | | FMAT using anti-rat insulin antibodies. Insulin secretion from pancreatic beta cells is upregulated by |
| | | | | glucose and also by certain proteins/peptides, and disregulation is a key component in diabetes. |
| | | | | Exemplary assays that may be used or routinely modified to test for stimulation of insulin secretion (from |
| | | | | pancreatic cells) by polypeptides of the invention (including antibodies and agonists or antagonists of the |
| | | | | invention) include assays disclosed in: Shimizu, H., et al., Endocr J, 47(3): 261-9 (2000); Salapatek, A. M., |
| | | | | et al., Mol Endocrinol, 13(8): 1305-17 (1999); Filipsson, K., et al., Ann N Y Acad Sci, 865: 441-4 |
| | | | | (1998); Olson, L. K., et al., J Biol Chem, 271(28): 16544-52(1996); and, Miraglia S et. al., Journal of |
| | | | | Biomolecular Screening, 4: 193-204 (1999), the contents of each of which is herein incorporated by |
| | | | | reference in its entirety. Pancreatic cells that may be used according to these assays are publicly |
| | | | | available (e.g., through the ATCC) and/or may be routinely generated. Exemplary pancreatic cells that |
| | | | | may be used according to these assays include HITT15 Cells. HITT15 are an adherent epithelial cell line |
| | | | | established from Syrian hamster islet cells transformed with SV40. These cells express glucagon, |
| | | | | somatostatin, and glucocorticoid receptors. The cells secrete insulin, which is stimulated by glucose and |
| | | | | glucagon and suppressed by somatostatin or glucocorticoids. ATTC# CRL-1777 Refs: Lord and |
| | | | | Ashcroft. Biochem. J. 219: 547-551; Santerre et al. Proc. Natl. Acad. Sci. USA 78: 4339-4343, 1981. |
| 69 | HHENV10 | 368 | Regulation of | Assays for the regulation of transcription through the FAS promoter element are well-known in the art |
| | | | transcription | and may be used or routinely modified to assess the ability of polypeptides of the invention (including |
| | | | through the FAS | antibodies and agonists or antagonists of the invention) to activate the FAS promoter element in a |
| | | | promoter | reporter construct and to regulate transcription of FAS, a key enzyme for lipogenesis. FAS promoter is |
| | | | element in | regulated by many transcription factors including SREBP. Insulin increases FAS gene transcription in |
| | | | hepatocytes | livers of diabetic mice. This stimulation of transcription is also somewhat glucose dependent. |
| | | | | Exemplary assays that may be used or routinely modified to test for FAS promoter element activity (in |
| | | | | hepatocytes) by polypeptides of the invention (including antibodies and agonists or antagonists of the |
| | | | | invention) include assays disclosed in Xiong, S., et al., Proc Natl Acad Sci U.S.A., 97(8): 3948-53 (2000); |
| | | | | Roder, K., et al, Eur J Biochem, 260(3): 743-51(1999); Oskouian B, et al., Biochem J, 317 (Pt 1): 257-65 |
| | | | | (1996); Berger, et al., Gene 66: 1-10 (1988); and, Cullen, B., et al., Methods in Enzymol. 216: 362-368 |
| | | | | (1992), the contents of each of which is herein incorporated by reference in its entirety. Hepatocytes that |
| | | | | may be used according to these assays, such as H4IIE cells, are publicly available (e.g., through the |
| | | | | ATCC) and/or may be routinely generated. Exemplary hepatocytes that may be used according to these |
| | | | | assays include rat liver hepatoma cell line(s) inducible with glucocorticoids, insulin, or cAMP |
| | | | | derivatives. |
| 70 | HHGCG53 | 369 | Stimulation of | Assays for measuring secretion of insulin are well-known in the art and may be used or routinely |
| | | | insulin secretion | modified to assess the ability of polypeptides of the invention (including antibodies and agonists or |
| | | | from pancreatic | antagonists of the invention) to stimulate insulin secretion. For example, insulin secretion is measured by |
| | | | beta cells. | FMAT using anti-rat insulin antibodies. Insulin secretion from pancreatic beta cells is upregulated by |
| | | | | glucose and also by certain proteins/peptides, and disregulation is a key component in diabetes. |
| | | | | Exemplary assays that may be used or routinely modified to test for stimulation of insulin secretion (from |
| | | | | pancreatic cells) by polypeptides of the invention (including antibodies and agonists or antagonists of the |
| | | | | invention) include assays disclosed in: Ahren, B., et al., Am J Physiol, 277(4 Pt 2): R959-66 (1999); Li, M., |
| | | | | et al., Endocrinology, 138(9): 3735-40 (1997); Kim, K. H., et al., FEBS Lett, 377(2): 237-9 (1995); |
| | | | | and, Miraglia S et. al., Journal of Biomolecular Screening, 4: 193-204 (1999), the contents of each of |
| | | | | which is herein incorporated by reference in its entirety. Pancreatic cells that may be used according to |
| | | | | these assays are publicly available (e.g., through the ATCC) and/or may be routinely generated. |
| | | | | Exemplary pancreatic cells that may be used according to these assays include rat INS-1 cells. INS-1 |
| | | | | cells are a semi-adherent cell line established from cells isolated from an X-ray induced rat transplantable |
| | | | | insulinoma. These cells retain characteristics typical of native pancreatic beta cells including glucose |
| | | | | inducible insulim secretion. References: Asfari et al. Endocrinology 1992 130: 167. |
| 71 | HHGCM76 | 370 | Stimulation of | Assays for measuring secretion of insulin are well-known in the art and may be used or routinely |
| | | | insulin secretion | modified to assess the ability of polypeptides of the invention (including antibodies and agonists or |
| | | | from pancreatic | antagonists of the invention) to stimulate insulin secretion. For example, insulin secretion is measured by |
| | | | beta cells. | FMAT using anti-rat insulin antibodies. Insulin secretion from pancreatic beta cells is upregulated by |
| | | | | glucose and also by certain proteins/peptides, and disregulation is a key component in diabetes. |
| | | | | Exemplary assays that may be used or routinely modified to test for stimulation of insulin secretion (from |
| | | | | pancreatic cells) by polypeptides of the invention (including antibodies and agonists or antagonists of the |
| | | | | invention) include assays disclosed in: Ahren, B., et al., Am J Physiol, 277(4 Pt 2): R959-66 (1999); Li, M., |
| | | | | et al., Endocrinology, 138(9): 3735-40 (1997); Kim, K. H., et al., FEBS Lett, 377(2): 237-9 (1995); |
| | | | | and, Miraglia S et. al., Journal of Biomolecular Screening, 4: 193-204 (1999), the contents of each of |
| | | | | which is herein incorporated by reference in its entirety. Pancreatic cells that may be used according to |
| | | | | these assays are publicly available (e.g., through the ATCC) and/or may be routinely generated. |
| | | | | Exemplary pancreatic cells that may be used according to these assays include rat INS-1 cells. INS-1 |
| | | | | cells are a semi-adherent cell line established from cells isolated from an X-ray induced rat transplantable |
| | | | | insulinoma. These cells retain characteristics typical of native pancreatic beta cells including glucose |
| | | | | inducible insulin secretion. References: Asfari et al. Endocrinology 1992 130: 167. |
| 71 | HHGCM76 | 370 | Production of | Assays for measuring expression of ICAM-1 are well-known in the art and may be used or routinely |
| | | | ICAM-1 | modified to assess the ability of polypeptides of the invention (including antibodies and agonists or |
| | | | | antagonists of the invention) to regulate ICAM-1 expression. Exemplary assays that may be used or |
| | | | | routinely modified to measure ICAM-1 expression include assays disclosed in: Takacs P, et al, FASEB J, |
| | | | | 15(2): 279-281 (2001); and, Miyamoto K, et al., Am J Pathol, 156(5): 1733-1739 (2000), the contents of |
| | | | | each of which is herein incorporated by reference in its entirety. Cells that may be used according to |
| | | | | these assays are publicly available (e.g., through the ATCC) and/or may be routinely generated. |
| | | | | Exemplary cells that may be used according to these assays include microvascular endothelial cells |
| | | | | (MVEC). |
| 72 | HHPEN62 | 371 | Stimulation of | Assays for measuring calcium flux are well-known in the art and may be used or routinely modified to |
| | | | Calcium Flux in | assess the ability of polypeptides of the invention (including antibodies and agonists or antagonists of the |
| | | | pancreatic beta | invention) to mobilize calcium. For example, the FLPR assay may be used to measure influx of calcium. |
| | | | cells. | Cells normally have very low concentrations of cytosolic calcium compared to much higher extracellular |
| | | | | calcium. Extracellular factors can cause an influx of calcium, leading to activation of calcium responsive |
| | | | | signaling pathways and alterations in cell functions. Exemplary assays that may be used or routinely |
| | | | | modified to measure calcium flux by polypeptides of the invention (including antibodies and agonists or |
| | | | | antagonists of the invention) include assays disclosed in: Satin LS, et al., Endocrinology, 136(10): 4589-601 |
| | | | | (1995); Mogami H, et al., Endocrinology, 136(7): 2960-6 (1995); Richardson SB, et al., Biochem J, |
| | | | | 288 (Pt 3): 847-51 (1992); and, Meats, JE, et al., Cell Calcium 1989 Nov-Dec; 10(8): 535-41 (1989), the |
| | | | | contents of each of which is herein incorporated by reference in its entirety. Pancreatic cells that may be |
| | | | | used according to these assays are publicly available (e.g., through the ATCC) and/or may be routinely |
| | | | | generated. Exemplary pancreatic cells that may be used according to these assays include HITT15 Cells. |
| | | | | HITT15 are an adherent epithelial cell line established from Syrian hamster islet cells transformed with |
| | | | | SV40. These cells express glucagon, somatostatin, and glucocorticoid receptors. The cells secrete |
| | | | | insulin, which is stimulated by glucose and glucagon and suppressed by somatostatin or glucocorticoids. |
| | | | | ATTC# CRL-1777 Refs: Lord and Ashcroft. Biochem. J. 219: 547-551; Santerre et al. Proc. Natl. |
| | | | | Acad. Sci. USA 78: 4339-4343, 1981. |
| 73 | HJABB94 | 372 | Insulin | Assays for measuring secretion of insulin are well-known in the art and may be used or routinely |
| | | | Secretion | modified to assess the ability of polypeptides of the invention (including antibodies and agonists or |
| | | | | antagonists of the invention) to stimulate insulin secretion. For example, insulin secretion is measured by |
| | | | | FMAT using anti-rat insulin antibodies. Insulin secretion from pancreatic beta cells is upregulated by |
| | | | | glucose and also by certain proteins/peptides, and disregulation is a key component in diabetes. |
| | | | | Exemplary assays that may be used or routinely modified to test for stimulation of insulin secretion (from |
| | | | | pancreatic cells) by polypeptides of the invention (including antibodies and agonists or antagonists of the |
| | | | | invention) include assays disclosed in: Shimizu, H., et al., Endocr J, 47(3): 261-9 (2000); Salapatek, A. M., |
| | | | | et al., Mol Endocrinol, 13(8): 1305-17 (1999); Filipsson, K., et al., Ann N Y Acad Sci, 865: 441-4 |
| | | | | (1998); Olson, L. K., et al., J Biol Chem, 271(28): 16544-52 (1996); and, Miraglia S et. al., Journal of |
| | | | | Biomolecular Screening, 4: 193-204 (1999), the contents of each of which is herein incorporated by |
| | | | | reference in its entirety. Pancreatic cells that may be used according to these assays are publicly |
| | | | | available (e.g., through the ATCC) and/or may be routinely generated. Exemplary pancreatic cells that |
| | | | | may be used according to these assays include HITT15 Cells. HITT15 are an adherent epithelial cell line |
| | | | | established from Syrian hamster islet cells transformed with SV40. These cells express glucagon, |
| | | | | somatostatin, and glucocorticoid receptors. The cells secrete insulin, which is stimulated by glucose and |
| | | | | glucagon and suppressed by somatostatin or glucocorticoids. ATTC# CRL-1777 Refs: Lord and |
| | | | | Ashcroft. Biochem. J. 219: 547-551; Santerre et al. Proc. Natl. Acad. Sci. USA 78: 4339-4343, 1981. |
| 74 | HJACG30 | 373 | Activation of | Assays for the activation of transcription through the Serum Response Element (SRE) are well-known in |
| | | | transcription | the art and may be used or routinely modified to assess the ability of polypeptides of the invention |
| | | | through serum | (including antibodies and agonists or antagonists of the invention) to regulate the serum response factors |
| | | | response | and modulate the expression of genes involved in growth. Exemplary assays for transcription through |
| | | | element in | the SRE that may be used or routinely modified to test SRE activity of the polypeptides of the invention |
| | | | immune cells | (including antibodies and agonists or antagonists of the invention) include assays disclosed in Berger et |
| | | | (such as T- | al., Gene 66: 1-10 (1998); Cullen and Malm, Methods in Enzymol 216: 362-368 (1992); Henthom et al., |
| | | | cells). | Proc Natl Acad Sci USA 85: 6342-6346 (1988); and Black et al., Virus Genes 12(2): 105-117 (1997), the |
| | | | | content of each of which are herein incorporated by reference in its entirety. T cells that may be used |
| | | | | according to these assays are publicly available (e.g., through the ATCC). Exemplary mouse T cells that |
| | | | | may be used according to these assays include the CTLL cell line, which is an IL-2 dependent suspension |
| | | | | culture of T cells with cytotoxic activity. |
| 74 | HJACG30 | 373 | Stimulation of | Assays for measuring secretion of insulin are well-known in the art and may be used or routinely |
| | | | insulin secretion | modified to assess the ability of polypeptides of the invention (including antibodies and agonists or |
| | | | from pancreatic | antagonists of the invention) to stimulate insulin secretion. For example, insulin secretion is measured by |
| | | | beta cells. | FMAT using anti-rat insulin antibodies. Insulin secretion from pancreatic beta cells is upregulated by |
| | | | | glucose and also by certain proteins/peptides, and disregulation is a key component in diabetes. |
| | | | | Exemplary assays that may be used or routinely modified to test for stimulation of insulin secretion (from |
| | | | | pancreatic cells) by polypeptides of the invention (including antibodies and agonists or antagonists of the |
| | | | | invention) include assays disclosed in: Abren, B., et al., Am J Physiol, 277(4 Pt 2): R959-66 (1999); Li, M., |
| | | | | et al., Endocrinology, 138(9): 3735-40 (1997); Kim, K. H., et al., FEBS Lett, 377(2): 237-9 (1995); |
| | | | | and, Miraglia S et. al., Journal of Biomolecular Screening, 4: 193-204 (1999), the contents of each of |
| | | | | which is herein incorporated by reference in its entirety. Pancreatic cells that may be used according to |
| | | | | these assays are publicly available (e.g., through the ATCC) and/or may be routinely generated. |
| | | | | Exemplary pancreatic cells that may be used according to these assays include rat INS-1 cells. INS-1 |
| | | | | cells are a semi-adherent cell line established from cells isolated from an X-ray induced rat transplantable |
| | | | | insulinoma. These cells retain characteristics typical of native pancreatic beta cells including glucose |
| | | | | inducible insulin secretion. References: Asfari et al. Endocrinology 1992 130: 167. |
| 75 | HJBCY35 | 374 | Regulation of | Assays for the regulation of viability and proliferation of cells in vitro are well-known in the art and may |
| | | | viability and | be used or routinely modified to assess the ability of polypeptides of the invention (including antibodies |
| | | | proliferation of | and agonists or antagonists of the invention) to regulate viability and proliferation of pancreatic beta |
| | | | pancreatic beta | cells. For example, the Cell Titer-Glo luminescent cell viability assay measures the number of viable |
| | | | cells. | cells in culture based on quantitation of the ATP present which signals the presence of metabolically |
| | | | | active cells. Exemplary assays that may be used or routinely modified to test regulation of viability and |
| | | | | proliferation of pancreatic beta cells by polypeptides of the invention (including antibodies and agonists |
| | | | | or antagonists of the invention) include assays disclosed in: Friedrichsen BN, et al., Mol Endocrinol, |
| | | | | 15(1): 136-48 (2001); Huotari MA, et al., Endocrinology, 139(4): 1494-9 (1998); Hugl SR, et al., J Biol |
| | | | | Chem 1998 Jul 10; 273(28): 17771-9 (1998), the contents of each of which is herein incorporated by |
| | | | | reference in its entirety. Pancreatic cells that may be used according to these assays are publicly |
| | | | | available (e.g., through the ATCC) and/or may be routinely generated. Exemplary pancreatic cells that |
| | | | | may be used according to these assays include rat INS-1 cells. INS-1 cells are a semi-adherent cell line |
| | | | | established from cells isolated from an X-ray induced rat transplantable insulinoma. These cells retain |
| | | | | characteristics typical of native pancreatic beta cells including glucose inducible insulin secretion. |
| | | | | References: Asfari et al. Endocrinology 1992 130: 167. |
| 75 | HJBCY35 | 374 | Activation of | Kinase assay. Kinase assays, for example an GSK-3 kinase assay, for PI3 kinase signal transduction that |
| | | | Skeletal Mucle | regulate glucose metabolism and cell survivial are well-known in the art and may be used or routinely |
| | | | Cell PI3 Kinase | modified to assess the ability of polypeptides of the invention (including antibodies and agonists or |
| | | | Signalling | antagonists of the invention) to promote or inhibit glucose metabolism and cell survival. Exemplary |
| | | | Pathway | assays for PI3 kinase activity that may be used or routinely modified to test PI3 kinase-induced activity |
| | | | | of polypeptides of the invention (including antibodies and agonists or antagonists of the invention) |
| | | | | include assays disclosed in Forrer et al., Biol Chem 379(8-9): 1101-1110 (1998); Nikoulina et al., |
| | | | | Diabetes 49(2): 263-271 (2000); and Schreyer et al., Diabetes 48(8): 1662-1666 (1999), the contents of |
| | | | | each of which are herein incorporated by reference in its entirety. Rat myoblast cells that may be used |
| | | | | according to these assays are publicly available (e.g., through the ATCC). Exemplary rat myoblast cells |
| | | | | that may be used according to these assays include L6 cells. L6 is an adherent rat myoblast cell line, |
| | | | | isolated from primary cultures of rat thigh muscle, that fuses to form multinucleated myotubes and |
| | | | | striated fibers after culture in differentiation media. |
| 76 | HJPAD75 | 375 | Activation of T- | Kinase assay. JNK and p38 kinase assays for signal transduction that regulate cell proliferation, |
| | | | Cell p38 or JNK | activation, or apoptosis are well known in the art and may be used or routinely modified to assess the |
| | | | Signaling | ability of polypeptides of the invention (including antibodies and agonists or antagonists of the invention) |
| | | | Pathway. | to promote or inhibit immune cell (e.g. T-cell) proliferation, activation, and apoptosis. Exemplary assays |
| | | | | for JNK and p38 kinase activity that may be used or routinely modified to test JNK and p38 kinase- |
| | | | | induced activity of polypeptides of the invention (including antibodies and agonists or antagonists of the |
| | | | | invention) include the assays disclosed in Forrer et al., Biol Chem 379(8-9): 1101-1110 (1998); Gupta et |
| | | | | al., Exp Cell Res 247(2): 495-504 (1999); Kyriakis JM, Biochem Soc Symp 64: 29-48 (1999); Chang and |
| | | | | Karin, Nature 410(6824): 37-40 (2001); and Cobb MH, Prog Biophys Mol Biol 71(3-4): 479-500 (1999); |
| | | | | the contents of each of which are herein incorporated by reference in its entirety. T cells that may be |
| | | | | used according to these assays are publicly available (e.g., through the ATCC). Exemplary mouse T cells |
| | | | | that may be used according to these assays include the CTLL cell line, which is an IL-2 dependent |
| | | | | suspension-culture cell line with cytotoxic activity. |
| 76 | HJPAD75 | 375 | Production of | IL-6 FMAT. IL-6 is produced by T cells and has strong effects on B cells. IL-6 participates in IL-4 |
| | | | IL-6 | induced IgE production and increases IgA production (IgA plays a role in mucosal immunity). IL-6 |
| | | | | induces cytotoxic T cells. Deregulated expression of IL-6 has been linked to autoimmune disease, |
| | | | | plasmacytomas, myelomas, and chronic hyperproliferative diseases. Assays for immunomodulatory and |
| | | | | differentiation factor proteins produced by a large variety of cells where the expression level is strongly |
| | | | | regulated by cytokines, growth factors, and hormones are well known in the art and may be used or |
| | | | | routinely modified to assess the ability of polypeptides of the invention (including antibodies and |
| | | | | agonists or antagonists of the invention) to mediate immunomodulation and differentiation and modulate |
| | | | | T cell proliferation and function. Exemplary assays that test for immunomodulatory proteins evaluate the |
| | | | | production of cytokines, such as IL-6, and the stimulation and upregulation of T cell proliferation and |
| | | | | functional activities. Such assays that may be used or routinely modified to test immunomodulatory and |
| | | | | diffferentiation activity of polypeptides of the invention (including antibodies and agonists or antagonists |
| | | | | of the invention) include assays disclosed in Miraglia et al., J Biomolecular Screening 4: 193-204(1999); |
| | | | | Rowland et al., “Lymphocytes: a practical approach” Chapter 6: 138-160 (2000); and Verhasselt et al., J |
| | | | | Immunol 158: 2919-2925 (1997), the contents of each of which are herein incorporated by reference in its |
| | | | | entirety. Human dendritic cells that may be used according to these assays may be isolated using |
| | | | | techniques disclosed herein or otherwise known in the art. Human dendritic cells are antigen presenting |
| | | | | cells in suspension culture, which, when activated by antigen and/or cytokines, initiate and upregulate T |
| | | | | cell proliferation and functional activities. |
| 76 | HJPAD75 | 375 | Regulation of | Assays for the regulation of transcription through the FAS promoter element are well-known in the art |
| | | | transcription | and may be used or routinely modified to assess the ability of polypeptides of the invention (including |
| | | | through the FAS | antibodies and agonists or antagonists of the invention) to activate the FAS promoter element in a |
| | | | promoter | reporter construct and to regulate transcription of FAS, a key enzyme for lipogenesis. FAS promoter is |
| | | | element in | regulated by many transcription factors including SREBP. Insulin increases FAS gene transcription in |
| | | | hepatocytes | livers of diabetic mice. This stimulation of transcription is also somewhat glucose dependent. |
| | | | | Exemplary assays that may be used or routinely modified to test for FAS promoter element activity (in |
| | | | | hepatocytes) by polypeptides of the invention (including antibodies and agonists or antagonists of the |
| | | | | invention) include assays disclosed in Xiong, S., et al., Proc Natl Acad Sci U.S.A., 97(8): 3948-53 (2000); |
| | | | | Roder, K., et al., Eur J Biochem, 260(3): 743-51 (1999); Oskouian B, et al., Biochem J, 317 (Pt 1): 257-65 |
| | | | | (1996); Berger, et al., Gene 66: 1-10 (1988); and, Cullen, B., et al., Methods in Euzymol. 216: 362-368 |
| | | | | (1992), the contents of each of which is herein incorporated by reference in its entirety. Hepatocytes that |
| | | | | may be used according to these assays, such as H4IIE cells, are publicly available (e.g., through the |
| | | | | ATCC) and/or may be routinely generated. Exemplary hepatocytes that may be used according to these |
| | | | | assays include rat liver hepatoma cell line(s) inducible with glucocorticoids, insulin, or cAMP |
| | | | | derivatives. |
| 77 | HKABZ65 | 376 | Production of | IL-6 FMAT. IL-6 is produced by T cells and has strong effects on B cells. IL-6 participates in IL-4 |
| | | | IL-6 | induced IgE production and increases IgA production (IgA plays a role in mucosal immunity). IL-6 |
| | | | | induces cytotoxic T cells. Deregulated expression of IL-6 has been linked to autoimmune disease, |
| | | | | plasmacytomas, myelomas, and chronic hyperproliferative diseases. Assays for immunomodulatory and |
| | | | | differentiation factor proteins produced by a large variety of cells where the expression level is strongly |
| | | | | regulated by cytokines, growth factors, and hormones are well known in the art and may be used or |
| | | | | routinely modified to assess the ability of polypeptides of the invention (including antibodies and |
| | | | | agonists or antagonists of the invention) to mediate immunomodulation and differentiation and modulate |
| | | | | T cell proliferation and function. Exemplary assays that test for immunomodulatory proteins evaluate the |
| | | | | production of cytokines, such as IL-6, and the stimulation and upregulation of T cell proliferation and |
| | | | | functional activities. Such assays that may be used or routinely modified to test immunomodulatory and |
| | | | | diffferentiation activity of polypeptides of the invention (including antibodies and agonists or antagonists |
| | | | | of the invention) include assays disclosed in Miraglia et al., J Biomolecular Screening 4: 193-204(1999); |
| | | | | Rowland et al., “Lymphocytes: a practical approach” Chapter 6: 138-160 (2000); and Verhasselt et al., J |
| | | | | Immunol 158: 2919-2925 (1997), the contents of each of which are herein incorporated by reference in its |
| | | | | entirety. Human dendritic cells that may be used according to these assays may be isolated using |
| | | | | techniques disclosed herein or otherwise known in the art. Human dendritic cells are antigen presenting |
| | | | | cells in suspension culture, which, when activated by antigen and/or cytokines, initiate and upregulate T |
| | | | | cell proliferation and functional activities. |
| 77 | HKABZ65 | 376 | Activation of | Kinase assay. JNK and p38 kinase assays for signal transduction that regulate cell proliferation, |
| | | | Endothelial Cell | activation, or apoptosis are well known in the art and may be used or routinely modified to assess the |
| | | | p38 or JNK | ability of polypeptides of the invention (including antibodies and agonists or antagonists of the invention) |
| | | | Signaling | to promote or inhibit cell proliferation, activation, and apoptosis. Exemplary assays for JNK and p38 |
| | | | Pathway. | kinase activity that may be used or routinely modified to test JNK and p38 kinase-induced activity of |
| | | | | polypeptides of the invention (including antibodies and agonists or antagonists of the invention) include |
| | | | | the assays disclosed in Forrer et al., Biol Chem 379(8-9): 1101-1110 (1998); Gupta et al., Exp Cell Res |
| | | | | 247(2): 495-504 (1999); Kyriakis JM, Biochem Soc Symp 64: 29-48 (1999); Chang and Karin, Nature |
| | | | | 410(6824): 37-40 (2001); and Cobb MH, Prog Biophys Mol Biol 71(3-4): 479-500 (1999); the contents of |
| | | | | each of which are herein incorporated by reference in its entirety. Endothelial cells that may be used |
| | | | | according to these assays are publicly available (e.g., through the ATCC). Exemplary endothelial cells |
| | | | | that may be used according to these assays include human umbilical vein endothelial cells (HUVEC), |
| | | | | which are endothelial cells which line venous blood vessels, and are involved in functions that include, |
| | | | | but are not limited to, angiogenesis, vascular permeability, vascular tone, and immune cell extravasation. |
| 77 | HKABZ65 | 376 | Regulation of | Caspase Apoptosis. Assays for caspase apoptosis are well known in the art and may be used or |
| | | | apoptosis in | routinely modified to assess the ability of polypeptides of the invention (including antibodies and |
| | | | pancreatic beta | agonists or antagonists of the invention) to promote caspase protease-mediated apoptosis. Apoptosis in |
| | | | cells. | pancreatic beta is associated with induction and progression of diabetes. Exemplary assays for caspase |
| | | | | apoptosis that may be used or routinely modified to test capase apoptosis activity of polypeptides of the |
| | | | | invention (including antibodies and agonists or antagonists of the invention) include the assays disclosed |
| | | | | in: Loweth, AC, et al., FEBS Lett, 400(3): 285-8 (1997); Saini, KS, et al., Biochem Mol Biol Int, |
| | | | | 39(6): 1229-36 (1996); Krautheim, A., et al., Br J Pharmacol, 129(4): 687-94 (2000); Chandra J, et al., |
| | | | | Diabetes, 50 Suppl 1: S44-7 (2001); Suk K, et al., J Immunol, 166(7): 4481-9 (2001); Tejedo J, et al., |
| | | | | FEBS Lett, 459(2): 238-43 (1999); Zhang, S., et al., FEBS Lett, 455(3): 315-20 (1999); Lee et al., FEBS |
| | | | | Left 485(2-3): 122-126 (2000); Nor et al., J Vasc Res 37(3): 209-218 (2000); and Karsan and Harlan, J |
| | | | | Atheroscler Thromb 3(2): 75-80 (1996); the contents of each of which are herein incorporated by |
| | | | | reference in its entirety. Pancreatic cells that may be used according to these assays are publicly |
| | | | | available (e.g., through the ATCC) and/or may be routinely generated. Exemplary pancreatic cells that |
| | | | | may be used according to these assays include RIN-m. RIN-m is a rat adherent pancreatic beta cell |
| | | | | insulinoma cell line derived from a radiation induced transplantable rat islet cell tumor. The cells |
| | | | | produce and secrete islet polypeptide hormones, and produce insulin, somatostatin, and possibly |
| | | | | glucagon. ATTC: #CRL-2057 Chick et al. Proc. Natl. Acad. Sci. 1977 74: 628; AF et al. Proc. Natl. |
| | | | | Acad. Sci. 1980 77: 3519. |
| 78 | HKACB56 | 377 | Myoblast cell | Assays for muscle cell proliferation are well known in the art and may be used or routinely modified to |
| | | | proliferation | assess the ability of polypeptides of the invention (including antibodies and agonists or antagonists of the |
| | | | | invention) to stimulate or inhibit myoblast cell proliferation. Exemplary assays for myoblast cell |
| | | | | proliferation that may be used or routinely modified to test activity of polypeptides and antibodies of the |
| | | | | invention (including agonists or antagonists of the invention) include, for example, assays disclosed in: |
| | | | | Soeta, C., et al. “Possible role for the c-ski gene in the proliferation of myogenic cells in regenerating |
| | | | | skeletal muscles of rats” Dev Growth Differ Apr; 43(2): 155-64 (2001); Ewton DZ, et al., “IGF binding |
| | | | | proteins-4, -5 and -6 may play specialized roles during L6 myoblast proliferation and differentiation” J |
| | | | | Endocrinol Mar; 144(3): 539-53 (1995); and, Pampusch MS, et al.,“Effect of transforming growth factor |
| | | | | beta on proliferation of L6 and embryonic porcine myogenic cells” J Cell Physiol Jun; 143(3): 524-8 |
| | | | | (1990); the contents of each of which are herein incorporated by reference in their entirety. Exemplary |
| | | | | myoblast cells that may be used according to these assays include the rat myoblast L6 cell line. Rat |
| | | | | myoblast L6 cells are an adherent rat myoblast cell line, isolated from primary cultures of rat thigh |
| | | | | muscle, that fuse to form multinucleated myotubes and striated fibers after culture in differentiation |
| | | | | media. |
| 78 | HKACB56 | 377 | Production of | IL-5 FMAT. Assays for immunomodulatory proteins secreted by TH2 cells, mast cells, basophils, and |
| | | | IL-5 | eosinophils that stimulate eosinophil function and B cell Ig production and promote polarization of CD4+ |
| | | | | cells into TH2 cells are well known in the art and may be used or routinely modified to assess the ability |
| | | | | of polypeptides of the invention (including antibodies and agonists or antagonists of the invention) to |
| | | | | mediate immunomodulation, stimulate immune cell function, modulate B cell Ig production, modulate |
| | | | | immune cell polarization, and/or mediate humoral or cell-mediated immunity. Exemplary assays that test |
| | | | | for immunomodulatory proteins evaluate the production of cytokines, such as IL-5, and the stimulation of |
| | | | | eosinophil function and B cell Ig production. Such assays that may be used or routinely modified to test |
| | | | | immunomodulatory activity of polypeptides of the invention (including antibodies and agonists or |
| | | | | antagonists of the invention) include the assays disclosed in Miraglia et al., J Biomolecular Screening |
| | | | | 4: 193-204 (1999); Rowland et al., “Lymphocytes: a practical approach” Chapter 6: 138-160 (2000); |
| | | | | Ohshima et al., Blood 92(9): 3338-3345 (1998); Jung et al., Eur J Immunol 25(8): 2413-2416 (1995); Mori |
| | | | | et al., J Allergy Clin Immunol 106(1 Pt 2): 558-564 (2000); and Koning et al., Cytokine 9(6): 427-436 |
| | | | | (1997), the contents of each of which are herein incorporated by reference in its entirety. Human T cells |
| | | | | that may be used according to these assays may be isolated using techniques disclosed herein or |
| | | | | otherwise known in the art. Human T cells are primary human lymphocytes that mature in the thymus |
| | | | | and express a T cell receptor and CD3, CD4, or CD8. These cells mediate humoral or cell-mediated |
| | | | | immunity and may be preactivated to enhance responsiveness to immunomodulatory factors. |
| 78 | HKACB56 | 377 | Production of | Assays for measuring expression of VCAM are well-known in the art and may be used or routinely |
| | | | VCAM in | modified to assess the ability of polypeptides of the invention (including antibodies and agonists or |
| | | | endothelial cells | antagonists of the invention) to regulate VCAM expression. For example, FMAT may be used to meaure |
| | | | (such as human | the upregulation of cell surface VCAM-1 expresssion in endothelial cells. Endothelial cells are cells that |
| | | | umbilical vein | line blood vessels, and are involved in functions that include, but are not limited to, angiogenesis, |
| | | | endothelial cells | vascular permeability, vascular tone, and immune cell extravasation. Exemplary endothelial cells that |
| | | | (HUVEC)) | may be used according to these assays include human umbilical vein endothelial cells (HUVEC), which |
| | | | | are available from commercial sources. The expression of VCAM (CD106), a membrane-associated |
| | | | | protein, can be upregulated by cytokines or other factors, and contributes to the extravasation of |
| | | | | lymphocytes, leucocytes and other immune cells from blood vessels; thus VCAM expression plays a role |
| | | | | in promoting immune and inflammatory responses. |
| 78 | HKACB56 | 377 | Activation of | Kinase assay. JNK and p38 kinase assays for signal transduction that regulate cell proliferation, |
| | | | Endothelial Cell | activation, or apoptosis are well known in the art and may be used or routinely modified to assess the |
| | | | p38 or JNK | ability of polypeptides of the invention (including antibodies and agonists or antagonists of the invention) |
| | | | Signaling | to promote or inhibit cell proliferation, activation, and apoptosis. Exemplary assays for JNK and p38 |
| | | | Pathway. | kinase activity that may be used or routinely modified to test JNK and p38 kinase-induced activity of |
| | | | | polypeptides of the invention (including antibodies and agonists or antagonists of the invention) include |
| | | | | the assays disclosed in Forrer et al., Biol Chem 379(8-9): 1101-1110 (1998); Gupta et al., Exp Cell Res |
| | | | | 247(2): 495-504 (1999); Kyriakis JM, Biochem Soc Symp 64: 29-48 (1999); Chang and Karin, Nature |
| | | | | 410(6824): 37-40 (2001); and Cobb MH, Prog Biophys Mol Biol 71(3-4): 479-500 (1999); the contents of |
| | | | | each of which are herein incorporated by reference in its entirety. Endothelial cells that may be used |
| | | | | according to these assays are publicly available (e.g., through the ATCC). Exemplary endothelial cells |
| | | | | that may be used according to these assays include human umbilical vein endothelial cells (HUVEC), |
| | | | | which are endothelial cells which line venous blood vessels, and are involved in functions that include, |
| | | | | but are not limited to, angiogenesis, vascular permeability, vascular tone, and immune cell extravasation. |
| 78 | HKACB56 | 377 | Upregulation of | CD152 FMAT. CD152 (a.k.a. CTLA-4) expression is restricted to activated T cells. CD152 is a |
| | | | CD152 and | negative regulator of T cell proliferation. Reduced CD152 expression has been linked to |
| | | | activation of T | hyperproliferative and autoimmune diseases. Overexpression of CD152 may lead to impaired |
| | | | cells | immunoresponses. Assays for immunomodulatory proteins important in the maintenance of T cell |
| | | | | homeostasis and expressed almost exclusively on CD4+ and CD8+ T cells are well known in the art and |
| | | | | may be used or routinely modified to assess the ability of polypeptides of the invention (including |
| | | | | antibodies and agonists or antagonists of the invention) to modulate the activation of T cells, maintain T |
| | | | | cell homeostasis, and/or mediate humoral or cell-mediated immunity. Exemplary assays that test for |
| | | | | immunomodulatory proteins evaluate the upregulation of cell surface markers, such as CD152, and the |
| | | | | activation of T cells. Such assays that may be used or routinely modified to test immunomodulatory |
| | | | | activity of polypeptides of the invention (including antibodies and agonists or antagonists of the |
| | | | | invention) include, for example, the assays disclosed in Miraglia et al., J Biomolecular Screening 4: 193-204 |
| | | | | (1999); Rowland et al., “Lymphocytes: a practical approach” Chapter 6: 138-160 (2000); McCoy et |
| | | | | al., Immunol Cell Biol 77(1): 1-10 (1999); Oostervegal et al., Curr Opin Immunol 11(3): 294-300 (1999); |
| | | | | and Saito T, Curr Opin Immunol 10(3): 313-321 (1998), the contents of each of which are herein |
| | | | | incorporated by reference in its entirety. Human T cells that may be used according to these assays may |
| | | | | be isolated using techniques disclosed herein or otherwise known in the art. Human T cells are primary |
| | | | | human lymphocytes that mature in the thymus and express a T Cell receptor and CD3, CD4, or CD8. |
| | | | | These cells mediate humoral or cell-mediated immunity and may be preactivated to enhance |
| | | | | responsiveness to immunomodulatory factors. |
| 79 | HKACD58 | 378 | Regulation of | Assays for the regulation of transcription through the DMEF1 response element are well-known in the art |
| | | | transcription via | and may be used or routinely modified to assess the ability of polypeptides of the invention (including |
| | | | DMEF1 | antibodies and agonists or antagonists of the invention) to activate the DMEF1 response element in a |
| | | | response | reporter construct (such as that containing the GLUT4 promoter) and to regulate insulin production. The |
| | | | element in | DMEF1 response element is present in the GLUT4 promoter and binds to MEF2 transcription factor and |
| | | | adipocytes and | another transcription factor that is required for insulin regulation of Glut4 expression in skeletal muscle. |
| | | | pre-adipocytes | GLUT4 is the primary insulin-responsive glucose transporter in fat and muscle tissue. Exemplary assays |
| | | | | that may be used or routinely modified to test for DMEF1 response element activity (in adipocytes and |
| | | | | pre-adipocytes) by polypeptides of the invention (including antibodies and agonists or antagonists of the |
| | | | | invention) include assays disclosed inThai, M. V., et al., J Biol Chem, 273(23): 14285-92 (1998); Mora, S., |
| | | | | et al., J Biol Chem, 275(21): 16323-8 (2000); Liu, M. L., et al., J Biol Chem, 269(45): 28514-21 (1994); |
| | | | | “Identification of a 30-base pair regulatory element and novel DNA binding protein that regulates the |
| | | | | human GLUT4 promoter in transgenic mice”, J Biol Chem. 2000 Aug 4; 275(31): 23666-73; Berger, et al., |
| | | | | Gene 66: 1-10 (1988); and, Cullen, B., et al., Methods in Enzymol. 216: 362-368 (1992), the contents of |
| | | | | each of which is herein incorporated by reference in its entirety. Adipocytes and pre-adipocytes that may |
| | | | | be used according to these assays are publicly available (e.g., through the ATCC) and/or may be |
| | | | | routinely generated. Exemplary cells that may be used according to these assays include the mouse 3T3- |
| | | | | L1 cell line which is an adherent mouse preadipocyte cell line. Mouse 3T3-L1 cells are a continuous |
| | | | | substrain of 3T3 fibroblasts developed through clonal isolation. These cells undergo a pre-adipocyte to |
| | | | | adipose-like conversion under appropriate differentiation culture conditions. |
| 79 | HKACD58 | 378 | IL-2 in Human | |
| | | | T cells | |
| 79 | HKACD58 | 378 | Activation of | Assays for the activation of transcription through the Serum Response Element (SRE) are well-known in |
| | | | transcription | the art and may be used or routinely modified to assess the ability of polypeptides of the invention |
| | | | through serum | (including antibodies and agonists or antagonists of the invention) to regulate serum response factors and |
| | | | response | modulate the expression of genes involved in growth and upregulate the function of growth-related genes |
| | | | element in | in many cell types. Exemplary assays for transcription through the SRE that may be used or routinely |
| | | | immune cells | modified to test SRE activity of the polypeptides of the invention (including antibodies and agonists or |
| | | | (such as natural | antagonists of the invention) include assays disclosed in Berger et al., Gene 66: 1-10 (1998); Cullen and |
| | | | killer cells). | Malm, Methods in Enzymol 216: 362-368 (1992); Henthorn et al., Proc Natl Acad Sci USA 85: 6342-6346 |
| | | | | (1988); Benson et al., J Immunol 153(9): 3862-3873 (1994); and Black et al., Virus Genes 12(2): 105-117 |
| | | | | (1997), the content of each of which are herein incorporated by reference in its entirety. T cells that may |
| | | | | be used according to these assays are publicly available (e.g., through the ATCC). Exemplary T cells |
| | | | | that may be used according to these assays include the NK-YT cell line, which is a human natural killer |
| | | | | cell line with cytolytic and cytotoxic activity. |
| 80 | HKAEV06 | 379 | Regulation of | Assays for the regulation of viability and proliferation of cells in vitro are well-known in the art and may |
| | | | viability and | be used or routinely modified to assess the ability of polypeptides of the invention (including antibodies |
| | | | proliferation of | and agonists or antagonists of the invention) to regulate viability and proliferation of pancreatic beta |
| | | | pancreatic beta | cells. For example, the Cell Titer-Glo luminescent cell viability assay measures the number of viable |
| | | | cells. | cells in culture based on quantitation of the ATP present which signals the presence of metabolically |
| | | | | active cells. Exemplary assays that may be used or routinely modified to test regulation of viability and |
| | | | | proliferation of pancreatic beta cells by polypeptides of the invention (including antibodies and agonists |
| | | | | or antagonists of the invention) include assays disclosed in: Ohtani KI, et al., Endocrinology, 139(1): 172-8 |
| | | | | (1998); Krautheim A, et al, Exp Clin Endocrinol Diabetes, 107 (1): 29-34 (1999), the contents of each |
| | | | | of which is herein incorporated by reference in its entirety. Pancreatic cells that may be used according |
| | | | | to these assays are publicly available (e.g., through the ATCC) and/or may be routinely generated. |
| | | | | Exemplary pancreatic cells that may be used according to these assays include HITT15 Cells. HITT15 |
| | | | | are an adherent epithelial cell line established from Syrian hamster islet cells transformed with SV40. |
| | | | | These cells express glucagon, somatostatin, and glucocorticoid receptors. The cells secrete insulin, |
| | | | | which is stimulated by glucose and glucagon and suppressed by somatostatin or glucocorticoids. ATTC# |
| | | | | CRL-1777 Refs: Lord and Ashcroft. Biochem. J. 219: 547-551; Santerre et al. Proc. Natl. Acad. Sci. |
| | | | | USA 78: 4339-4343, 1981. |
| 80 | HKAEV06 | 379 | Activation of | Assays for the activation of transcription through the AP1 response element are well-known in the art and |
| | | | transcription | may be used or routinely modified to assess the ability of polypeptides of the invention (including |
| | | | through AP1 | antibodies and agonists or antagonists of the invention) to modulate growth and other cell functions. |
| | | | response | Exemplary assays for transcription through the AP1 response element that may be used or routinely |
| | | | element in | modified to test AP1-response element activity of polypeptides of the invention (including antibodies and |
| | | | immune cells | agonists or antagonists of the invention) include assays disclosed in Berger et al., Gene 66: 1-10 (1988); |
| | | | (such as T-cells). | Cullen and Malm, Methods in Enzymol 216: 362-368 (1992); Henthorn et al., Proc Natl Acad Sci USA |
| | | | | 85: 6342-6346 (1988); Rellahan et al., J Biol Chem 272(49): 30806-30811 (1997); Chang et al., Mol Cell |
| | | | | Biol 18(9): 4986-4993 (1998); and Fraser et al., Eur J Immunol 29(3): 838-844 (1999), the contents of |
| | | | | each of which are herein incorporated by reference in its entirety. Human T cells that may be used |
| | | | | according to these assays are publicly available (e.g., through the ATCC). Exemplary human T cells that |
| | | | | may be used according to these assays include the SUPT cell line, which is an IL-2 and IL-4 responsive |
| | | | | suspension-culture cell line. |
| 81 | HKAFT66 | 380 | Myoblast cell | Assays for muscle cell proliferation are well known in the art and may be used or routinely modified to |
| | | | proliferation | assess the ability of polypeptides of the invention (including antibodies and agnoists or antagonists of the |
| | | | | invention) to stimulate or inhibit myoblast cell proliferation. Exemplary assays for myoblast cell |
| | | | | proliferation that my be used or routinely modified to test activity of polypeoptides and antibodies of the |
| | | | | invention (including agonists or antagonists of the invention) include, for example, assays disclosed in: |
| | | | | Soeta, C., et al. “Possible role for the c-ski gene in the proliferation of myogenic cells in regenerating |
| | | | | skeletal muscles of rats” Dev Growth Differ Apr; 43(2): 155-64 (2001); Ewton DZ, et al., “IGF binding |
| | | | | protein-4, -5 and -6 may play specialized roles during L6 myoblast proliferation and differentiation” J |
| | | | | Endocrinol Mar; 144(3): 539-53 (1995); and, Pampusch MS, et al., “Effect of transforming growth factor |
| | | | | beta on proliferation of L6 and embryonic porcine myogenic cells” J Cell Physiol Jun; 143(3): 524-8 |
| | | | | (1990); the contents of each of which are herein incorporated by reference in their entirety. Exemplary |
| | | | | myoblast cells that may be used according to these assays include the rat myoblast L6 cell line. Rat |
| | | | | muscle, that fuse to form multinucleated myotubes and striated fibers after culture in differentiation media. |
| 81 | HKAFT66 | 380 | Insulin | Assays for measuring secretion of insulin are well-known in the art and may be used or routinely |
| | | | Secretion | modified to assess the ability of polypeptides of the invention (including antibodies and agonists or |
| | | | | antagonists of the invention) to stimulate insulin secretion. For example, insulin secretion is measured by |
| | | | | FMAT using anti-rat insulin antibodies. Insulin secretion from pancreatic beta cells is upregulated by |
| | | | | glucose and also by certain proteins/peptides, and disregulation is a key component in diabetes. |
| | | | | Exemplary assays that may be used or routinely modified to test for stimulation of insulin secretion (from |
| | | | | pancreatic cells) by polypeptides of the invention (including antibodies and agonists or antagonists of the |
| | | | | invention) include assays disclosed in: Shimizu, H., et al., Endocr J, 47(3): 261-9 (2000); Salapatek,A. M., |
| | | | | et al., Mol Endocrinol, 13(8): 1305-17 (1999); Filipsson, K., et al., Ann N Y Acad Sci, 865: 441-4 |
| | | | | (1998); Olson, L. K., et al., J biol Chem, 271(28): 16544-52 (1996); and, Miraglia S et. al., Journal of |
| | | | | Biomolecular Screening, 4: 193-204 (1999), the contents of each of which is herein incorporated by |
| | | | | reference in its entirety. Pancreatic cells that may be used according to these assays are publicly |
| | | | | available (e.g., through the ATCC) and/or may be routinely generated. Exemplary pancreatic cells that |
| | | | | may be used according to these assays include HITT15 Cells. HITT15 are an adherent epithelial cell line |
| | | | | established from Syrian hamster islet cells transformed with SV40. These cells express glucagon, |
| | | | | somatostatin, and glucocorticoid receptors. The cells secrete insulin, which is stimulated by glucose and |
| | | | | glucagon and suppressed by somatostatin or glucocorticoids. ATTC# CRL-1777 Refs: Lord and |
| | | | | Ashcroft. Biochem. J. 219: 547-551; Santerre et al. Proc. Natl. Acad. Sci. USA 78: 4339-4343, 1981. |
| 81 | HKAFT66 | 380 | Activation of | This reporter assay measures activation of the GATA-3 signaling pathway in HMC-1 human mast cell |
| | | | transcription | line. Activation of GATA-3 in mast cells has been linked to cytokine and chemokine production. Assays |
| | | | through GATA- | for the activation of transcription through the GATA3 response element are well-known in the art and |
| | | | 3 response | may be used or routinely modified to assess the ability of polypeptides of the invention (including |
| | | | element in | antibodies and agonists or antagonists of the invention) to regulate GATA3 transcription factors and |
| | | | immune cells | modulate expression of mast cell genes important for immune response development. Exemplary assays |
| | | | (such as mast cells). | for transcription through the GATA3 response element that may be used or routinely modified to test |
| | | | | GATA3-response element activity of polypeptides of the invention (including antibodies and agonists or |
| | | | | antagonists of the invention) include assays disclosed in Berger et al., Gene 66: 1-10 (1998); Cullen and |
| | | | | Malm, Methods in Enzymol 216: 362-368 (1992); Henthorn et al., Proc Natl Acad Sci USA 85: 6342-6346 |
| | | | | (1988); Flavell et al., Cold Spring Harb Symp Quant Biol 64: 563-571 (1999); Rodriguez-Palmero et al., |
| | | | | Eur J Immunol 29(12): 3914-3924 (1999); Zheng and Flavell, Cell 89(4): 587-596 (1997); and Henderson |
| | | | | et al., Mol Cell Biol 14(6): 4286-4294 (1994), the contents of each of which are herein incorporated by |
| | | | | reference in its entirety. Mast cells that may be used according to these assays are publicly available |
| | | | | (e.g., through the ATCC). Exemplary human mast cells that may be used according to these assays |
| | | | | include the HMC-1 cell line, which is an immature human mast cell line established from the peripheral |
| | | | | blood of a patient with mast cell leukemia, and exhibits many characteristics of immature mast cells. |
| 81 | HKAFT66 | 380 | Activation of | This reporter assay measures activation of the NFAT signaling pathway in HMC-1 human mast cell line. |
| | | | transcription | Activation of NFAT in mast cells has been linked to cytokine and chemokine production. Assays for the |
| | | | through NFAT | activation of transcription through the Nuclear Factor of Activated T cells (NFAT) response element are |
| | | | response | well-known in the art and may be used or routinely modified to assess the ability of polypeptides of the |
| | | | element in | invention (including antibodies and agonists or antagonists of the invention) to regulate NFAT |
| | | | immune cells | transcription factors and modulate expression of genes involved in immunomodulatory functions. |
| | | | (such as mast | Exemplary assays for transcription through the NFAT response element that may be used or routinely |
| | | | cells). | modified to test NFAT-response element activity of polypeptides of the invention (including antibodies |
| | | | | and agonists or antagonists of the invention) include assays disclosed in Berger et al., Gene 66: 1-10 |
| | | | | (1998); Cullen and Malm, Methods in Enzymol 216: 362-368 (1992); Henthorn et al., Proc Natl Acad Sci |
| | | | | USA 85: 6342-6346 (1988); De Boer et al., Int J Biochem Cell Biol 31(10): 1221-1236 (1999); Ali et al., J |
| | | | | Immunol 165(12): 7215-7223 (2000); Hutchinson and McCloskey, J Biol Chem 270(27): 16333-16338 |
| | | | | (1995), and Turner et al., J Exp Med 188: 527-537 (1998), the contents of each of which are herein |
| | | | | incorporated by reference in its entirety. Mast cells that may be used according to these assays are |
| | | | | publicly available (e.g., through the ATCC). Exemplary human mast cells that may be used according to |
| | | | | these assays include the HMC-1 cell line, which is an immature human mast cell line established from |
| | | | | the peripheral blood of a patient with mast cell leukemia, and exhibits many characteristics of immature mast cells. |
| 82 | HKB1E57 | 381 | Regulation of | Assays for the regulation of viability and proliferation of cells in vitro are well-known in the art and may |
| | | | viability and | be used or routinely modified to assess the ability of polypeptides of the invention (including antibodies |
| | | | proliferation of | and agonists or antagonists of the invention) to regulate viability and proliferation of pancreatic beta |
| | | | pancreatic beta | cells. For example, the Cell Titer-Glo luminescent cell viability assay measures the number of viable |
| | | | cells. | cells in culture based on quantitation of the ATP present which signals the presence of metabolically |
| | | | | active cells. Exemplary assays that may be used or routinely modified to test regulation of viability and |
| | | | | proliferation of pancreatic beta cells by polypeptides of the invention (including antibodies and agonists |
| | | | | or antagonists of the invention) include assays disclosed in: Friedrichsen BN, et al., Mol Endocrinol, |
| | | | | 15(1): 136-48 (2001); Huotari MA, et al., Endocrinology, 139(4): 1494-9 (1998); Hugl SR, et al., J Biol |
| | | | | Chem 1998 Jul 10; 273(28): 17771-9 (1998), the contents of each of which is herein incorporated by |
| | | | | reference in its entirety. Pancreatic cells that may be used according to these assays are publicly |
| | | | | available (e.g., through the ATCC) and/or may be routinely generated. Exemplary pancreatic cells that |
| | | | | may be used according to these assays include rat INS-1 cells. INS-1 cells are a semi-adherent cell line |
| | | | | established from cells isolated from an X-ray induced rat transplantable insulinoma. These cells retain |
| | | | | characteristics typical of native pancreatic beta cells including glucose inducible insulin secretion. |
| | | | | References: Asfari et al., Endocrinology 1992 130: 167. |
| 83 | HKFBC53 | 382 | Regulation of | Assays for the regulation of transcription of Malic Enzyme are well-known in the art and may be used or |
| | | | transcription of | routinely modified to assess the ability of polypeptides of the invention (including antibodies and |
| | | | Malic Enzyme | agonists or antagonists of the invention) to regulate transcription of Malic Enzyme, a key enzyme in |
| | | | in adipocytes | lipogenesis. Malic enzyme is involved in lipogenesisand its expression is stimulted by insulin. ME |
| | | | | promoter contains two direct repeat (DR1)- like elements MEp and MEd identified as putative PPAR |
| | | | | response elements. ME promoter may also responds to AP1 and other transcription factors. Exemplary |
| | | | | assays that may be used or routinely modified to test for regulation of transcription of Malic Enzyme (in |
| | | | | adipoocytes) by polypeptides of the invention (including antibodies and agonists or antagonists of the |
| | | | | invention) include assays disclosed in: Streeper, R. S., et al., Mol Endocrinol, 12(11): 1778-91 (1998); |
| | | | | Garcia-Jimenez, C., et al., Mol Endocrinol, 8(10): 1361-9 (1994); Barroso, I., et al., J Biol Chem, |
| | | | | 274(25): 17997-8004 (1999); Ijpenberg, A., et al., J Biol Chem, 272(32): 20108-20117 (1997); Berger, et |
| | | | | al., Gene 66: 1-10 (1988); and, Cullen, B., et al., Methods in Enzymol. 216: 362-368 (1992), the contents |
| | | | | of each of which is herein incorporated by reference in its entirety. Hepatocytes that may be used |
| | | | | according to these assays are publicly available (e.g., through the ATCC) and/or may be routinely |
| | | | | generated. Exemplary hepatocytes that may be used according to these assays includes the H4IIE rat liver |
| | | | | hepatoma cell line. |
| 84 | HKGDL36 | 383 | Regulation of | Assays for the regulation of viability and proliferation of cells in vitro are Well-known in the art and may |
| | | | viability and | be used or routinely modified to assess the ability of polypeptides of the invention (including antibodies |
| | | | proliferation of | and agonists or antagonists of the invention) to regulate viability and proliferation of pancreatic beta |
| | | | pancreatic beta | cells. For example, the Cell Titer-Glo luminescent cell viability assay measures the number of viable |
| | | | cells. | cells in culture based on quantitation of the ATP present which signals the presence of metabolically |
| | | | | active cells. Exemplary assays that may be used or routinely modified to test regulation of viability and |
| | | | | proliferation of pancreatic beta cells by polypeptides of the invention (including antibodies and agonists |
| | | | | or antagonists of the invention) include assays disclosed in: Friedrichsen BN, et al., Mol Endocrinol, |
| | | | | 15(1): 136-48 (2001); Huotari MA, et al., Endocrinology, 139(4): 1494-9 (1998); Hugl SR, et al., J Biol |
| | | | | Chem 1998 Jul 10; 273(28): 17771-9 (1998), the contents of each of which is herein incorporated by |
| | | | | reference in its entirety. Pancreatic cells that may be used according to these assays are publicly |
| | | | | available (e.g., through the ATCC) and/or may be routinely generated. Exemplary pancreatic cells that |
| | | | | may be used according to these assays include rat INS-1 cells. INS-1 cells are a semi-adherent cell line |
| | | | | established from cells isolated from an X-ray induced rat transplantable insulinoma. These cells retain |
| | | | | characteristics typical of native pancreatic beta cells including glucose inducible insulin secretion. |
| | | | | References: Asfari et al. Endocrinology 1992 130: 167. |
| 85 | HKISB57 | 384 | Activation of | Kinase assay. JNK kinase assays for signal transduction that regulate cell proliferation, activation, or |
| | | | JNK Signaling | apoptosis are well known in the art and may be used or routinely modified to assess the ability of |
| | | | Pathway in | polypeptides of the invention (including antibodies and agonists or antagonists of the invention) to |
| | | | immune cells | promote or inhibit cell proliferation, activation, and apoptosis. Exemplary assays for JNK kinase activity |
| | | | (such as | that may be used or routinely modified to test JNK kinase-induced activity of polypeptides of the |
| | | | eosinophils). | invention (including antibodies and agonists or antagonists of the invention) include the assays disclosed |
| | | | | in Forrer et al., Biol Chem 379(8-9): 1101-1110 (1998); Gupta et al., Exp Cell Res 247(2): 495-504 |
| | | | | (1999); Kyriakis JM, Biochem Soc Symp 64: 29-48 (1999); Chang and Karin, Nature 410(6824): 37-40 |
| | | | | (2001); and Cobb MH, Prog Biophys Mol Biol 71(3-4): 479-500 (1999); the contents of each of which are |
| | | | | herein incorporated by reference in its entirety. Exemplary cells that may be used according to these |
| | | | | assays include eosinophils. Eosinophils are important in the late stage of allergic reactions; they are |
| | | | | recruited to tissues and mediate the inflammatory response of late stage allergic reaction. Moreover, |
| | | | | exemplary assays that may be used or routinely modified to assess the ability of polypeptides of the |
| | | | | invention (including antibodies and agonists or antagonists of the invention) to modulate signal |
| | | | | transduction, cell proliferation, activation, or apoptosis in eosinophils include assays disclosed and/or |
| | | | | cited in: Zhang JP, et al., “Role of caspases in dexamethasone-induced apoptosis and activation of c-Jun |
| | | | | NH2-terminal kinase and p38 mitogen-activated protein kinase in human eosinophils” Clin Exp |
| | | | | Immunol; Oct; 122(1): 20-7 (2000); Hebestreit H, et al., “Disruption of fas receptor signaling by nitric |
| | | | | oxide in eosinophils” J Exp Med; Feb 2; 187(3): 415-25 (1998); J Allergy Clin Immunol 1999 Sep; 104(3 |
| | | | | Pt 1): 565-74; and, Sousa AR, et al., “In vivo resistance to corticosteroids in bronchial asthma is |
| | | | | associated with enhanced phosyphorylation of JUN N-terminal kinase and failure of prednisolone to |
| | | | | inhibit JUN N-terminal kinase phosphorylation” J Allergy Clin Immunol; Sep; 104(3 Pt 1): 565-74 (1999); |
| | | | | the contents of each of which are herein incorporated by reference in its entirety. |
| 85 | HKISB57 | 384 | Regulation of | Assays for the regulation of transcription of Malic Enzyme are well-known in the art and may be used or |
| | | | transcription of | routinely modified to assess the ability of polypeptides of the invention (including antibodies and |
| | | | Malic Enzyme | agonists or antagonists of the invention) to regulate transcription of Malic Enzyme, a key enzyme in |
| | | | in adipocytes | lipogenesis. Malic enzyme is involved in lipogenesisand its expression is stimulted by insulin. ME |
| | | | | promoter contains two direct repeat (DR1)- like elements MEp and MEd identified as putative PPAR |
| | | | | response elements. ME promoter may also responds to AP1 and other transcription factors. Exemplary |
| | | | | assays that may be used or routinely modified to test for regulation of transcription of Malic Enzyme (in |
| | | | | adipoocytes) by polypeptides of the invention (including antibodies and agonists or antagonists of the |
| | | | | invention) include assays disclosed in: Streeper, R. S., et al., Mol Endocrinol, 12(11): 1778-91 (1998); |
| | | | | Garcia-Jimenez, C., et al., Mol Endocrinol, 8(10): 1361-9 (1994); Barroso, I., et al., J Biol Chem, |
| | | | | 274(25): 17997-8004 (1999); Ijpenberg, A., et al., J Biol Chem, 272(32):20108-20117 (1997); Berger, et |
| | | | | al., Gene 66:1-10 (1988); and, Cullen, B., et al., Methods in Enzymol. 216: 362-368 (1992), the contents |
| | | | | of each of which is herein incorporated by reference in its entirety. Hepatocytes that may be used |
| | | | | according to these assays are publicly available (e.g., through the ATCC) and/or may be routinely |
| | | | | generated. Exemplary hepatocytes that may be used according to these assays includes the H4IIE rat |
| | | | | liver hepatoma cell line. |
| 86 | HKMLM11 | 385 | Myoblast cell | Assays for muscle cell proliferation are well known in the art and may be used or routinely modified to |
| | | | proliferation | assess the ability of polypeptides of the invention (including antibodies and agonists or antagonists of the |
| | | | | invention) to stimulate or inhibit myoblast cell proliferation. Exemplary assays for myoblast cell |
| | | | | proliferation that may be used or routinely modified to test activity of polypeptides and antibodies of the |
| | | | | invention (including agonists or antagonists of the invention) include, for example, assays disclosed in: |
| | | | | Soeta, C., et al. “Possible role for the c-ski gene in the proliferation of myogenic cells in regenerating |
| | | | | skeletal muscles of rats” Dev Growth Differ Apr; 43(2): 155-64 (2001); Ewton DZ, et al., “IGF binding |
| | | | | proteins-4, -5 and -6 may play specialized roles during L6 myoblast proliferation and differentiation” J |
| | | | | Endocrinol Mar; 144(3): 539-53 (1995); and, Pampusch MS, et al., “Effect of transforming growth factor |
| | | | | beta on proliferation of L6 and embryonic porcine myogenic cells” J Cell Physiol Jun; 143(3): 524-8 |
| | | | | (1990); the contents of each of which are herein incorporated by reference in their entirety. Exemplary |
| | | | | myoblast cells that may be used according to these assays include the rat myoblast L6 cell line. Rat |
| | | | | myoblast L6 cells are an adherent rat myoblast cell line, isolated from primary cultures of rat thigh |
| | | | | muscle, that fuse to form multinucleated myotubes and striated fibers after culture in differentiation media. |
| 87 | HKMMW74 | 386 | Regulation of | Assays for the regulation of viability and proliferation of cells in vitro are well-known in the art and may |
| | | | viability and | be used or routinely modified to assess the ability of polypeptides of the invention (including antibodies |
| | | | proliferation of | and agonists or antagonists of the invention) to regulate viability and proliferation of pancreatic beta |
| | | | pancreatic beta | cells. For example, the Cell Titer-Glo luminescent cell viability assay measures the number of viable |
| | | | cells. | cells in culture based on quantitation of the ATP present which signals the presence of metabolically |
| | | | | active cells. Exemplary assays that may be used or routinely modified to test regulation of viability and |
| | | | | proliferation of pancreatic beta cells by polypeptides of the invention (including antibodies and agonists |
| | | | | or antagonists of the invention) include assays disclosed in: Friedrichsen BN, et al., Mol Endocrinol, |
| | | | | 15(1): 136-48 (2001); Huotari MA, et al., Endocrinology, 139(4): 1494-9 (1998); Hugl SR, et al., J Biol |
| | | | | Chem 1998 Jul 10; 273(28): 17771-9 (1998), the contents of each of which is herein incorporated by |
| | | | | reference in its entirety. Pancreatic cells that may be used according to these assays are publicly |
| | | | | available (e.g., through the ATCC) and/or may be routinely generated. Exemplary pancreatic cells that |
| | | | | may be used according to these assays include rat INS-1 cells. INS-1 cells are a semi-adherent cell line |
| | | | | established from cells isolated from an X-ray induced rat transplantable insulinoma. These cells retain |
| | | | | characteristics typical of native pancreatic beta cells including glucose inducible insulin secretion. |
| | | | | References: Asfari et al. Endocrinology 1992 130: 167. |
| 88 | HLDON23 | 387 | Regulation of | Assays for the regulation of transcription through the PEPCK promoter are well-known in the art and |
| | | | transcription | may be used or routinely modified to assess the ability of polypeptides of the invention (including |
| | | | through the | antibodies and agonists or antagonists of the invention) to activate the PEPCK promoter in a reporter |
| | | | PEPCK | construct and regulate liver gluconeogenesis. Exemplary assays for regulation of transcription through |
| | | | promoter in | the PEPCK promoter that may be used or routinely modified to test for PEPCK promoter activity (in |
| | | | hepatocytes | hepatocytes) of polypeptides of the invention (including antibodies and agonists or antagonists of the |
| | | | | invention) include assays disclosed in Berger et al., Gene 66: 1-10 (1998); Cullen and Malm, Methods in |
| | | | | Enzymol 216: 362-368 (1992); Henthorn et al., Proc Natl Acad Sci USA 85: 6342-6346 (1988); Lochhead |
| | | | | et al., Diabetes 49(6): 896-903 (2000); and Yeagley et al., J Biol Chem 275(23): 17814-17820 (2000), the |
| | | | | contents of each of which is herein incorporated by reference in its entirety. Hepatocyte cells that may be |
| | | | | used according to these assays are publicly available (e.g., through the ATCC) and/or may be routinely |
| | | | | generated. Exemplary liver hepatoma cells that may be used according to these assays include H4lle |
| | | | | cells, which contain a tyrosine amino transferase that is inducible with glucocorticoids, insulin, or cAMP |
| | | | | derivatives. |
| 88 | HLDON23 | 387 | Production of | Assays for measuring expression of VCAM are well-known in the art and may be used or routinely |
| | | | VCAM in | modified to assess the ability of polypeptides of the invention (including antibodies and agonists or |
| | | | endothelial cells | antagonists of the invention) to regulate VCAM expression. For example, FMAT may be used to meaure |
| | | | (such as human | the upregulation of cell surface VCAM-1 expresssion in endothelial cells. Endothelial cells are cells that |
| | | | umbilical vein | line blood vessels, and are involved in functions that include, but are not limited to, angiogenesis, |
| | | | endothelial cells | vascular permeability, vascular tone, and immune cell extravasation. Exemplary endothelial cells that |
| | | | (HUVEC)) | may be used according to these assays include human umbilical vein endothelial cells (HUVEC), which |
| | | | | are available from commercial sources. The expression of VCAM (CD106), a membrane-associated |
| | | | | protein, can be upregulated by cytokines or other factors, and contributes to the extravasation of |
| | | | | lymphocytes, leucocytes and other immune cells from blood vessels; thus VCAM expression plays a role |
| | | | | in promoting immune and inflammatory responses. |
| 88 | HLDON23 | 387 | Production of | Assays for measuring expression of ICAM-1 are well-known in the art and may be used or routinely |
| | | | ICAM-1 | modified to assess the ability of polypeptides of the invention (including antibodies and agonists or |
| | | | | antagonists of the invention) to regulate ICAM-1 expression. Exemplary assays that may be used or |
| | | | | routinely modified to measure ICAM-1 expression include assays disclosed in: Takacs P, et al., FASEB J, |
| | | | | 15(2): 279-281 (2001); and, Miyamoto K, et al., Am J Pathol, 156(5): 1733-1739 (2000), the contents of |
| | | | | each of which is herein incorporated by reference in its entirety. Cells that may be used according to |
| | | | | these assays are publicly available (e.g., through the ATCC) and/or may be routinely generated. |
| | | | | Exemplary cells that may be used according to these assays include microvascular endothelial cells (MVEC). |
| 88 | HLDON23 | 387 | Production of | Assays for production of IL-10 and activation of T-cells are well known in the art and may be used or |
| | | | IL-10 and | routinely modified to assess the ability of polypeptides of the invention (including antibodies and |
| | | | activation of T- | agonists or antagonists of the invention) to stimulate or inhibit production of IL-10 and/or activation of |
| | | | cells. | T-cells. Exemplary assays that may be used or routinely modified to assess the ability of polypeptides |
| | | | | and antibodies of the invention (including agonists or antagonists of the invention) to modulate IL-10 |
| | | | | production and/or T-cell proliferation include, for example, assays such as disclosed and/or cited in: |
| | | | | Robinson, DS, et al., “Th-2 cytokines in allergic disease” Br Med Bull; 56 (4): 956-968 (2000), and |
| | | | | Cohn, et al., “T-helper type 2 cell-directed therapy for asthma” Pharmacology & Therapeutics; 88: 187-196 |
| | | | | (2000); the contents of each of which are herein incorporated by reference in their entirety. |
| | | | | Exemplary cells that may be used according to these assays include Th2 cells. IL10 secreted from Th2 |
| | | | | cells may be measured as a marker of Th2 cell activation. Th2 cells are a class of T cells that secrete |
| | | | | IL4, IL10, IL13, IL5 and IL6. Factors that induce differentiation and activation of Th2 cells play a |
| | | | | major role in the initiation and pathogenesis of allergy and asthma. Primary T helper 2 cells are |
| | | | | generated via in vitro culture under Th2 polarizing conditions using peripheral blood lymphocytes |
| | | | | isolated from cord blood. |
| 89 | HLDQR62 | 388 | Regulation of | Assays for the regulation of viability and proliferation of cells in vitro are well-known in the art and may |
| | | | viability and | be used or routinely modified to assess the ability of polypeptides of the invention (including antibodies |
| | | | proliferation of | and agonists or antagonists of the invention) to regulate viability and proliferation of pancreatic beta |
| | | | pancreatic beta | cells. For example, the Cell Titer-Glo luminescent cell viability assay measures the number of viable |
| | | | cells. | cells in culture based on quantitation of the ATP present which signals the presence of metabolically |
| | | | | active cells. Exemplary assays that may be used or routinely modified to test regulation of viability and |
| | | | | proliferation of pancreatic beta cells by polypeptides of the invention (including antibodies and agonists |
| | | | | or antagonists of the invention) include assays disclosed in: Friedrichsen BN, et al., Mol Endocrinol, |
| | | | | 15(1): 136-48 (2001); Huotari MA, et al., Endocrinology, 139(4): 1494-9 (1998); Hugl SR, et al., J Biol |
| | | | | Chem 1998 Jul 10; 273(28): 17771-9 (1998), the contents of each of which is herein incorporated by |
| | | | | reference in its entirety. Pancreatic cells that may be used according to these assays are publicly |
| | | | | available (e.g., through the ATCC) and/or may be routinely generated. Exemplary pancreatic cells that |
| | | | | may be used according to these assays include rat INS-1 cells. INS-1 cells are a semi-adherent cell line |
| | | | | established from cells isolated from an X-ray induced rat transplantable insulinoma. These cells retain |
| | | | | characteristics typical of native pancreatic beta cells including glucose inducible insulin secretion. |
| | | | | References: Asfari et al. Endocrinology 1992 130: 167. |
| 89 | HLDQR62 | 388 | Activation of | Assays for the activation of transcription through the cAMP response element are well-known in the art |
| | | | transcription | and may be used or routinely modified to assess the ability of Polypeptides of the invention (including |
| | | | through cAMP | antibodies and agonists or antagonists of the invention) to increase cAMP and regulate CREB |
| | | | response | transcription factors, and modulate expression of genes involved in a wide variety of cell functions. |
| | | | element in | Exemplary assays for transcription through the cAMP response element that may be used or routinely |
| | | | immune cells | modified to test cAMP-response element activity of polypeptides of the invention (including antibodies |
| | | | (such as T- | and agonists or antagonists of the invention) include assays disclosed in Berger et al., Gene 66: 1-10 |
| | | | cells). | (1998); Cullen and Malm, Methods in Enzymol 216: 362-368 (1992); Henthorn et al., Proc Natl Acad Sci |
| | | | | USA 85: 6342-6346 (1988); Black et al., Virus Genes 15(2): 105-117 (1997); and Belkowski et al., J |
| | | | | Immunol 161(2): 659-665 (1998), the contents of each of which are herein incorporated by reference in its |
| | | | | entirety. T cells that may be used according to these assays are publicly available (e.g., through the |
| | | | | ATCC). Exemplary mouse T cells that may be used according to these assays include the CTLL cell |
| | | | | line, which is a suspension culture of IL-2 dependent cytotoxic T cells. |
| 90 | HLDQU79 | 389 | Regulation of | Assays for the regulation of viability and proliferation of cells in vitro are well-known in the art and may |
| | | | viability and | be used or routinely modified to assess the ability of polypeptides of the invention (including antibodies |
| | | | proliferation of | and agonists or antagonists of the invention) to regulate viability and proliferation of pancreatic beta |
| | | | pancreatic beta | cells. For example, the Cell Titer-Gb luminescent cell viability assay measures the number of viable |
| | | | cells. | cells in culture based on quantitation of the ATP present which signals the presence of metabolically |
| | | | | active cells. Exemplary assays that may be used or routinely modified to test regulation of viability and |
| | | | | proliferation of pancreatic beta cells by polypeptides of the invention (including antibodies and agonists |
| | | | | or antagonists of the invention) include assays disclosed in: Friedrichsen BN, et al., Mol Endocrinol, |
| | | | | 15(1): 136-48 (2001); Huotari MA, et al., Endocrinology, 139(4): 1494-9 (1998); Hugl SR, et al., J Biol |
| | | | | Chem 1998 Jul 10; 273(28): 17771-9 (1998), the contents of each of which is herein incorporated by |
| | | | | reference in its entirety. Pancreatic cells that may be used according to these assays are publicly |
| | | | | available (e.g., through the ATCC) and/or may be routinely generated. Exemplary pancreatic cells that |
| | | | | may be used according to these assays include rat INS-1 cells. INS-1 cells are a semi-adherent cell line |
| | | | | established from cells isolated from an X-ray induced rat transplantable insulinoma. These cells retain |
| | | | | characteristics typical of native pancreatic beta cells including glucose inducible insulin secretion. |
| | | | | References: Asfari et al. Endocrinology 1992 130: 167. |
| 90 | HLDQU79 | 389 | Activation of | Assays for the activation of transcription through the Serum Response Element (SRE) are well-known in |
| | | | transcription | the art and may be used or routinely modified to assess the ability of polypeptides of the invention |
| | | | through serum | (including antibodies and agonists or antagonists of the invention) to regulate the serum response factors |
| | | | response | and modulate the expression of genes involved in growth. Exemplary assays for transcription through |
| | | | element in | the SRE that may be used or routinely modified to test SRE activity of the polypeptides of the invention |
| | | | immune cells | (including antibodies and agonists or antagonists of the invention) include assays disclosed in Berger et |
| | | | (such as T- | al., Gene 66: 1-10 (1998); Cullen and Malm, Methods in Enzymol 216: 362-368 (1992); Henthorn et al., |
| | | | cells). | Proc Natl Acad Sci USA 85: 6342-6346 (1988); and Black et al., Virus Genes 12(2): 105-117 (1997), the |
| | | | | content of each of which are herein incorporated by reference in its entirety. T cells that may be used |
| | | | | according to these assays are publicly available (e.g., through the ATCC). Exemplary mouse T cells that |
| | | | | may be used according to these assays include the CTLL cell line, which is an IL-2 dependent suspension |
| | | | | culture of T cells with cytotoxic activity. |
| 91 | HLHAL68 | 390 | Regulation of | Assays for the regulation of viability and proliferation of cells in vitro are well-known in the art and may |
| | | | viability and | be used or routinely modified to assess the ability of polypeptides of the invention (including antibodies |
| | | | proliferation of | and agonists or antagonists of the invention) to regulate viability and proliferation of pancreatic beta |
| | | | pancreatic beta | cells. For example, the Cell Titer-Glo luminescent cell viability assay measures the number of viable |
| | | | cells. | cells in culture based on quantitation of the ATP present which signals the presence of metabolically |
| | | | | active cells. Exemplary assays that may be used or routinely modified to test regulation of viability and |
| | | | | proliferation of pancreatic beta cells by polypeptides of the invention (including antibodies and agonists |
| | | | | or antagonists of the invention) include assays disclosed in: Friedrichsen BN, et al., Mol Endocrinol, |
| | | | | 15(1): 136-48 (2001); Huotari MA, et al., Endocrinology, 139(4): 1494-9 (1998); Hugl SR, et al., J Biol |
| | | | | Chem 1998 Jul 10; 273(28): 17771-9 (1998), the contents of each of which is herein incorporated by |
| | | | | reference in its entirety. Pancreatic cells that may be used according to these assays are publicly |
| | | | | available (e.g., through the ATCC) and/or may be routinely generated. Exemplary pancreatic cells that |
| | | | | may be used according to these assays include rat INS-1 cells. INS-1 cells are a semi-adherent cell line |
| | | | | established from cells isolated from an X-ray induced rat transplantable insulinoma. These cells retain |
| | | | | characteristics typical of native pancreatic beta cells including glucose inducible insulin secretion. |
| | | | | References: Asfari et al. Endocrinology 1992 130: 167. |
| 92 | HLIBD68 | 391 | Production of | TNFa FMAT. Assays for immunomodulatory proteins produced by activated macrophages, T cells, |
| | | | TNF alpha by | fibroblasts, smooth muscle, and other cell types that exert a wide variety of inflammatory and cytotoxic |
| | | | dendritic cells | effects on a variety of cells are well known in the art and may be used or routinely modified to assess the |
| | | | | ability of polypeptides of the invention (including antibodies and agonists or antagonists of the invention) |
| | | | | to mediate immunomodulation, modulate inflammation and cytotoxicity. Exemplary assays that test for |
| | | | | immunomodulatory proteins evaluate the production of cytokines such as tumor necrosis factor alpha |
| | | | | (TNFa), and the induction or inhibition of an inflammatory or cytotoxic response. Such assays that may |
| | | | | be used or routinely modified to test immunomodulatory activity of polypeptides of the invention |
| | | | | (including antibodies and agonists or antagonists of the invention) include assays disclosed in Miraglia et |
| | | | | al., J Biomolecular Screening 4: 193-204(1999); Rowland et al., “Lymphocytes: a practical approach” |
| | | | | Chapter 6: 138-160 (2000); Verhasselt et al., Eur J Immunol 28(11): 3886-3890 (1198); Dahlen et al., J |
| | | | | Immunol 160(7): 3585-3593 (1998); Verhasselt et al., J Immunol 158: 2919-2925 (1997); and Nardelli et |
| | | | | al., J Leukoc Biol 65: 822-828 (1999), the contents of each of which are herein incorporated by reference |
| | | | | in its entirety. Human dendritic cells that may be used according to these assays may be isolated using |
| | | | | techniques disclosed herein or otherwise known in the art. Human dendritic cells are antigen presenting |
| | | | | cells in suspension culture, which, when activated by antigen and/or cytokines, initiate and upregulate T |
| | | | | cell proliferation and functional activities. |
| 92 | HLIBD68 | 391 | Production of | MIP-1alpha FMAT. Assays for immunomodulatory proteins produced by activated dendritic cells that |
| | | | MIP1alpha | upregulate monocyte/macrophage and T cell chemotaxis are well known in the art and may be used or |
| | | | | routinely modified to assess the ability of polypeptides of the invention (including antibodies and |
| | | | | agonists or antagonists of the invention) to mediate immunomodulation, modulate chemotaxis, and |
| | | | | modulate T cell differentiation. Exemplary assays that test for immunomodulatory proteins evaluate the |
| | | | | production of chemokines, such as macrophage inflammatory protein 1 alpha (MIP-1a), and the |
| | | | | activation of monocytes/macrophages and T cells. Such assays that may be used or routinely modified to |
| | | | | test immunomodulatory and chemotaxis activity of polypeptides of the invention (including antibodies |
| | | | | and agonists or antagonists of the invention) include assays disclosed in Miraglia et al., J Biomolecular |
| | | | | Screening 4: 193-204(1999); Rowland et al., “Lymphocytes: a practical approach” Chapter 6: 138-160 |
| | | | | (2000); Satthaporn and Eremin, J R Coll Surg Ednb 45(1): 9-19 (2001); Drakes et al., Transp Immunol |
| | | | | 8(1): 17-29 (2000); Verhasselt et al., J Immunol 158: 2919-2925 (1997); and Nardelli et al., J Leukoc Biol |
| | | | | 65: 822-828 (1999), the contents of each of which are herein incorporated by reference in its entirety. |
| | | | | Human dendritic cells that may be used according to these assays may be isolated using techniques |
| | | | | disclosed herein or otherwise known in the art. Human dendritic cells are antigen presenting cells in |
| | | | | suspension culture, which, when activated by antigen and/or cytokines, initiate and upregulate T cell |
| | | | | proliferation and functional activities. |
| 92 | HLIBD68 | 391 | Production of | IL-6 FMAT. IL-6 is produced by T cells and has strong effects on B cells. IL-6 participates in IL-4 |
| | | | IL-6 | induced IgE production and increases IgA production (IgA plays a role in mucosal immunity). IL-6 |
| | | | | induces cytotoxic T cells. Deregulated expression of IL-6 has been linked to autoimmune disease, |
| | | | | plasmacytomas, myelomas, and chronic hyperproliferative diseases. Assays for immunomodulatory and |
| | | | | differentiation factor proteins produced by a large variety of cells where the expression level is strongly |
| | | | | regulated by cytokines, growth factors, and hormones are well known in the art and may be used or |
| | | | | routinely modified to assess the ability of polypeptides of the invention (including antibodies and |
| | | | | agonists or antagonists of the invention) to mediate immunomodulation and differentiation and modulate |
| | | | | T cell proliferation and function. Exemplary assays that test for immunomodulatory proteins evaluate the |
| | | | | production of cytokines, such as IL-6, and the stimulation and upregulation of T cell proliferation and |
| | | | | functional activities. Such assays that may be used or routinely modified to test immunomodulatory and |
| | | | | differentiation activity of polypeptides of the invention (including antibodies and agonists or antagonists |
| | | | | of the invention) include assays disclosed in Miraglia et al., J Biomolecular Screening 4: 193-204(1999); |
| | | | | Rowland et al., “Lymphocytes: a practical approach” Chapter 6: 138-160 (2000); and Verhasselt et al., J |
| | | | | Immunol 158: 2919-2925 (1997), the contents of each of which are herein incorporated by reference in its |
| | | | | entirety. Human dendritic cells that may be used according to these assays may be isolated using |
| | | | | techniques disclosed herein or otherwise known in the art. Human dendritic cells are antigen presenting |
| | | | | cells in suspension culture, which, when activated by antigen and/or cytokines, initiate and upregulate T |
| | | | | cell proliferation and functional activities. |
| 92 | HLIBD68 | 391 | Stimulation of | Assays for measuring secretion of insulin are well-known in the art and may be used or routinely |
| | | | insulin secretion | modified to assess the ability of polypeptides of the invention (including antibodies and agonists or |
| | | | from pancreatic | antagonists of the invention) to stimulate insulin secretion. For example, insulin secretion is measured by |
| | | | beta cells. | FMAT using anti-rat insulin antibodies. Insulin secretion from pancreatic beta cells is upregulated by |
| | | | | glucose and also by certain proteins/peptides, and disregulation is a key component in diabetes. |
| | | | | Exemplary assays that may be used or routinely modified to test for stimulation of insulin secretion (from |
| | | | | pancreatic cells) by polypeptides of the invention (including antibodies and agonists or antagonists of the |
| | | | | invention) include assays disclosed in: Ahren, B., et al., Am J Physiol, 277(4 Pt 2): R959-66 (1999); Li, M., |
| | | | | et al., Endocrinology, 138(9): 3735-40 (1997); Kim, K. H., et al., FEBS Lett, 377(2): 237-9 (1995); |
| | | | | and, Miraglia S et. al., Journal of Biomolecular Screening, 4: 193-204 (1999), the contents of each of |
| | | | | which is herein incorporated by reference in its entirety. Pancreatic cells that may be used according to |
| | | | | these assays are publicly available (e.g., through the ATCC) and/or may be routinely generated. |
| | | | | Exemplary pancreatic cells that may be used according to these assays include rat INS-1 cells. INS-1 |
| | | | | cells are a semi-adherent cell line established from cells isolated from an X-ray induced rat transplantable |
| | | | | insulinoma. These cells retain characteristics typical of native pancreatic beta cells including glucose |
| | | | | inducible insulin secretion. References: Asfari et al. Endocrinology 1992 130: 167. |
| 93 | HLICQ90 | 392 | Activation of | Assays for the activation of transcription through the Serum Response Element (SRE) are well-known in |
| | | | transcription | the art and may be used or routinely modified to assess the ability of polypeptides of the invention |
| | | | through serum | (including antibodies and agonists or antagonists of the invention) to regulate the serum response factors |
| | | | response | and modulate the expression of genes involved in growth. Exemplary assays for transcription through |
| | | | element in | the SRE that may be used or routinely modified to test SRE activity of the polypeptides of the invention |
| | | | immune cells | (including antibodies and agonists or antagonists of the invention) include assays disclosed in Berger et |
| | | | (such as T- | al., Gene 66: 1-10 (1998); Cullen and Malm, Methods in Enzymol 216: 362-368 (1992); Henthorn et al., |
| | | | cells). | Proc Natl Acad Sci USA 85: 6342-6346 (1988); and Black et al., Virus Genes 12(2): 105-117 (1997), the |
| | | | | content of each of which are herein incorporated by reference in its entirety. T cells that may be used |
| | | | | according to these assays are publicly available (e.g., through the ATCC). Exemplary mouse T cells that |
| | | | | may be used according to these assays include the CTLL cell line, which is an IL-2 dependent suspension |
| | | | | culture of T cells with cytotoxic activity. |
| 93 | HLICQ90 | 392 | Production of | TNFa FMAT. Assays for immunomodulatory proteins produced by activated macrophages, T cells, |
| | | | TNF alpha by | fibroblasts, smooth muscle, and other cell types that exert a wide variety of inflammatory and cytotoxic |
| | | | dendritic cells | effects on a variety of cells are well known in the art and may be used or routinely modified to assess the |
| | | | | ability of polypeptides of the invention (including antibodies and agonists or antagonists of the invention) |
| | | | | to mediate immunomodulation, modulate inflammation and cytotoxicity. Exemplary assays that test for |
| | | | | immunomodulatory proteins evaluate the production of cytokines such as tumor necrosis factor alpha |
| | | | | (TNFa), and the induction or inhibition of an inflammatory or cytotoxic response. Such assays that may |
| | | | | be used or routinely modified to test immunomodulatory activity of polypeptides of the invention |
| | | | | (including antibodies and agonists or antagonists of the invention) include assays disclosed in Miraglia et |
| | | | | al., J Biomolecular Screening 4: 193-204(1999); Rowland et al., “Lymphocytes: a practical approach” |
| | | | | Chapter 6: 138-160 (2000); Verhasselt et al., Eur J Immunol 28(11): 3886-3890 (1198); Dahlen et al., J |
| | | | | Immunol 160(7): 3585-3593 (1998); Verhasselt et al., J Immunol 158: 2919-2925 (1997); and Nardelli et |
| | | | | al., J Leukoc Biol 65: 822-828 (1999), the contents of each of which are herein incorporated by reference |
| | | | | in its entirety. Human dendritic cells that may be used according to these assays may be isolated using |
| | | | | techniques disclosed herein or otherwise known in the art. Human dendritic cells are antigen presenting |
| | | | | cells in suspension culture, which, when activated by antigen and/or cytokines, initiate and upregulate T |
| | | | | cell proliferation and functional activities. |
| 93 | HLICQ90 | 392 | Stimulation of | Assays for measuring calcium flux are well-known in the art and may be used or routinely modified to |
| | | | Calcium Flux in | assess the ability of polypeptides of the invention (including antibodies and agonists or antagonists of the |
| | | | pancreatic beta | invention) to mobilize calcium. For example, the FLPR assay may be used to measure influx of calcium. |
| | | | cells. | Cells normally have very low concentrations of cytosolic calcium compared to much higher extracellular |
| | | | | calcium. Extracellular factors can cause an influx of calcium, leading to activation of calcium responsive |
| | | | | signaling pathways and alterations in cell functions. Exemplary assays that may be used or routinely |
| | | | | modified to measure calcium flux by polypeptides of the invention (including antibodies and agonists or |
| | | | | antagonists of the invention) include assays disclosed in: Satin LS, et al., Endocrinology, 136(10): 4589-601 |
| | | | | (1995); Mogami H, et al., Endocrinology, 136(7): 2960-6 (1995); Richardson SB, et al., Biochem J, |
| | | | | 288 (Pt 3): 847-51 (1992); and, Meats, JE, et al., Cell Calcium 1989 Nov-Dec; 10(8): 535-41 (1989), the |
| | | | | contents of each of which is herein incorporated by reference in its entirety. Pancreatic cells that may be |
| | | | | used according to these assays are publicly available (e.g., through the ATCC) and/or may be routinely |
| | | | | generated. Exemplary pancreatic cells that may be used according to these assays include HITT15 Cells. |
| | | | | HITT15 are an adherent epithelial cell line established from Syrian hamster islet cells transformed with |
| | | | | SV40. These cells express glucagon, somatostatin, and glucocorticoid receptors. The cells secrete |
| | | | | insulin, which is stimulated by glucose and glucagon and suppressed by somatostatin or glucocorticoids. |
| | | | | ATTC# CRL-1777 Refs: Lord and Ashcroft. Biochem. J. 219: 547-551; Santerre et al. Proc. Natl. |
| | | | | Acad. Sci. USA 78: 4339-4343, 1981. |
| 93 | HLICQ90 | 392 | Stimulation of | Assays for measuring secretion of insulin are well-known in the art and may be used or routinely |
| | | | insulin secretion | modified to assess the ability of polypeptides of the invention (including antibodies and agonists or |
| | | | from pancreatic | antagonists of the invention) to stimulate insulin secretion. For example, insulin secretion is measured by |
| | | | beta cells. | FMAT using anti-rat insulin antibodies. Insulin secretion from pancreatic beta cells is upregulated by |
| | | | | glucose and also by certain proteins/peptides, and disregulation is a key component in diabetes. |
| | | | | Exemplary assays that may be used or routinely modified to test for stimulation of insulin secretion (from |
| | | | | pancreatic cells) by polypeptides of the invention (including antibodies and agonists or antagonists of the |
| | | | | invention) include assays disclosed in: Ahren, B., et al., Am J Physiol, 277(4 Pt 2): R959-66 (1999); Li, M., |
| | | | | et al., Endocrinology, 138(9): 3735-40 (1997); Kim, K. H., et al., FEBS Lett, 377(2): 237-9 (1995); |
| | | | | and, Miraglia S et. al., Journal of Biomolecular Screening, 4: 193-204 (1999), the contents of each of |
| | | | | which is herein incorporated by reference in its entirety. Pancreatic cells that may be used according to |
| | | | | these assays are publicly available (e.g., through the ATCC) and/or may be routinely generated. |
| | | | | Exemplary pancreatic cells that may be used according to these assays include rat INS-1 cells. INS-1 |
| | | | | cells are a semi-adherent cell line established from cells isolated from an X-ray induced rat transplantable |
| | | | | insulinoma. These cells retain characteristics typical of native pancreatic beta cells including glucose |
| | | | | inducible insulin secretion. References: Asfari et al. Endocrinology 1992 130: 167. |
| 94 | HLTHR66 | 393 | Stimulation of | Assays for measuring secretion of insulin are well-known in the art and may be used or routinely |
| | | | insulin secretion | modified to assess the ability of polypeptides of the invention (including antibodies and agonists or |
| | | | from pancreatic | antagonists of the invention) to stimulate insulin secretion. For example, insulin secretion is measured by |
| | | | beta cells. | FMAT using anti-rat insulin antibodies. Insulin secretion from pancreatic beta cells is upregulated by |
| | | | | glucose and also by certain proteins/peptides, and disregulation is a key component in diabetes. |
| | | | | Exemplary assays that may be used or routinely modified to test for stimulation of insulin secretion (from |
| | | | | pancreatic cells) by polypeptides of the invention (including antibodies and agonists or antagonists of the |
| | | | | invention) include assays disclosed in: Ahren, B., et al., Am J Physiol, 277(4 Pt 2): R959-66 (1999); Li, M., |
| | | | | et al., Endocrinology, 138(9): 3735-40 (1997); Kim, K. H., et al., FEBS Lett, 377(2): 237-9 (1995); |
| | | | | and, Miraglia S et. al., Journal of Biomolecular Screening, 4: 193-204 (1999), the contents of each of |
| | | | | which is herein incorporated by reference in its entirety. Pancreatic cells that may be used according to |
| | | | | these assays are publicly available (e.g., through the ATCC) and/or may be routinely generated. |
| | | | | Exemplary pancreatic cells that may be used according to these assays include rat INS-1 cells. INS-1 |
| | | | | cells are a semi-adherent cell line established from cells isolated from an X-ray induced rat transplantable |
| | | | | insulinoma. These cells retain characteristics typical of native pancreatic beta cells including glucose |
| | | | | inducible insulin secretion. References: Asfari et al. Endocrinology 1992 130: 167. |
| 95 | HLTIP94 | 394 | Stimulation of | Assays for measuring secretion of insulin are well-known in the art and may be used or routinely |
| | | | insulin secretion | modified to assess the ability of polypeptides of the invention (including antibodies and agonists or |
| | | | from pancreatic | antagonists of the invention) to stimulate insulin secretion. For example, insulin secretion is measured by |
| | | | beta cells. | FMAT using anti-rat insulin antibodies. Insulin secretion from pancreatic beta cells is upregulated by |
| | | | | glucose and also by certain proteins/peptides, and disregulation is a key component in diabetes. |
| | | | | Exemplary assays that may be used or routinely modified to test for stimulation of insulin secretion (from |
| | | | | pancreatic cells) by polypeptides of the invention (including antibodies and agonists or antagonists of the |
| | | | | invention) include assays disclosed in: Ahren, B., et al., Am J Physiol, 277(4 Pt 2): R959-66 (1999); Li, M., |
| | | | | et al., Endocrinology, 138(9): 3735-40 (1997); Kim, K. H., et al., FEBS Lett, 377(2): 237-9 (1995); |
| | | | | and, Miraglia S et. al., Journal of Biomolecular Screening, 4: 193-204 (1999), the contents of each of |
| | | | | which is herein incorporated by reference in its entirety. Pancreatic cells that may be used according to |
| | | | | these assays are publicly available (e.g., through the ATCC) and/or may be routinely generated. |
| | | | | Exemplary pancreatic cells that may be used according to these assays include rat INS-1 cells. INS-1 |
| | | | | cells are a semi-adherent cell line established from cells isolated from an X-ray induced rat transplantable |
| | | | | insulinoma. These cells retain characteristics typical of native pancreatic beta cells including glucose |
| | | | | inducible insulin secretion. References: Asfari et al. Endocrinology 1992 130: 167. |
| 96 | HLWAA17 | 395 | Regulation of | Assays for the regulation of transcription of Malic Enzyme are well-known in the art and may be used or |
| | | | transcription of | routinely modified to assess the ability of polypeptides of the invention (including antibodies and |
| | | | Malic Enzyme | agonists or antagonists of the invention) to regulate transcription of Malic Enzyme, a key enzyme in |
| | | | in adipocytes | lipogenesis. Malic enzyme is involved in lipogenesisand its expression is stimulted by insulin. ME |
| | | | | promoter contains two direct repeat (DR1)-like elements MEp and MEd identified as putative PPAR |
| | | | | response elements. ME promoter may also responds to AP1 and other transcription factors. Exemplary |
| | | | | assays that may be used or routinely modified to test for regulation of transcription of Malic Enzyme (in |
| | | | | adipoocytes) by polypeptides of the invention (including antibodies and agonists or antagonists of the |
| | | | | invention) include assays disclosed in: Streeper, R. S., et al., Mol Endocrinol, 12(11): 1778-91 (1998); |
| | | | | Garcia-Jimenez, C., et al., Mol Endocrinol, 8(10): 1361-9 (1994); Barroso, I., et al., J Biol Chem, |
| | | | | 274(25): 17997-8004 (1999); Ijpenberg, A., et al., J Biol Chem, 272(32): 20108-20117 (1997); Berger, et |
| | | | | al., Gene 66: 1-10 (1988); and, Cullen, B., et al., Methods in Enzymol. 216: 362-368 (1992), the contents |
| | | | | of each of which is herein incorporated by reference in its entirety. Hepatocytes that may be used |
| | | | | according to these assays are publicly available (e.g., through the ATCC) and/or may be routinely |
| | | | | generated. Exemplary hepatocytes that may be used according to these assays includes the H4IIE rat |
| | | | | liver hepatoma cell line. |
| 96 | HLWAA17 | 395 | Production of | Assays for measuring expression of ICAM-1 are well-known in the art and may be used or routinely |
| | | | ICAM-1 | modified to assess the ability of polypeptides of the invention (including antibodies and agonists or |
| | | | | antagonists of the invention) to regulate ICAM-1 expression. Exemplary assays that may be used or |
| | | | | routinely modified to measure ICAM-1 expression include assays disclosed in: Takacs P, et al, FASEB J, |
| | | | | 15(2): 279-281 (2001); and, Miyamoto K, et al., Am J Pathol, 156(5): 1733-1739 (2000), the contents of |
| | | | | each of which is herein incorporated by reference in its entirety. Cells that may be used according to |
| | | | | these assays are publicly available (e.g., through the ATCC) and/or may be routinely generated. |
| | | | | Exemplary cells that may be used according to these assays include microvascular endothelial cells |
| | | | | (MVEC). |
| 97 | HLYAC95 | 396 | Production of | IFNgamma FMAT. IFNg plays a central role in the immune system and is considered to be a |
| | | | IFNgamma | proinflammatory cytokine. IFNg promotes TH1 and inhibits TH2 differentiation; promotes IgG2a and |
| | | | using a T cells | inhibits IgE secretion; induces macrophage activation; and increases MHC expression. Assays for |
| | | | | immunomodulatory proteins produced by T cells and NK cells that regulate a variety of inflammatory |
| | | | | activities and inhibit TH2 helper cell functions are well known in the art and may be used or routinely |
| | | | | modified to assess the ability of polypeptides of the invention (including antibodies and agonists or |
| | | | | antagonists of the invention) to mediate immunomodulation, regulate inflammatory activities, modulate |
| | | | | TH2 helper cell function, and/or mediate humoral or cell-mediated immunity. Exemplary assays that test |
| | | | | for immunomodulatory proteins evaluate the production of cytokines, such as Interferon gamma (IFNg), |
| | | | | and the activation of T cells. Such assays that may be used or routinely modified to test |
| | | | | immunomodulatory activity of polypeptides of the invention (including antibodies and agonists or |
| | | | | antagonists of the invention) include the assays disclosed in Miraglia et al., J Biomolecular Screening |
| | | | | 4: 193-204 (1999); Rowland et al., “Lymphocytes: a practical approach” Chapter 6: 138-160 (2000); |
| | | | | Gonzalez et al., J Clin Lab Anal 8(5): 225-233 (1995); Billiau et al., Ann NY Acad Sci 856: 22-32 (1998); |
| | | | | Boehm et al., Annu Rev Immunol 15: 749-795 (1997), and Rheumatology (Oxford) 38(3): 214-20 (1999), |
| | | | | the contents of each of which are herein incorporated by reference in its entirety. Human T cells that may |
| | | | | be used according to these assays may be isolated using techniques disclosed herein or otherwise known |
| | | | | in the art. Human T cells are primary human lymphocytes that mature in the thymus and express a T cell |
| | | | | receptor and CD3, CD4, or CD8. These cells mediate humoral or cell-mediated immunity and may be |
| | | | | preactivated to enhance responsiveness to immunomodulatory factors. |
| 97 | HLYAC95 | 396 | Stimulation of | Assays for measuring secretion of insulin are well-known in the art and may be used or routinely |
| | | | insulin secretion | modified to assess the ability of polypeptides of the invention (including antibodies and agonists or |
| | | | from pancreatic | antagonists of the invention) to stimulate insulin secretion. For example, insulin secretion is measured by |
| | | | beta cells. | FMAT using anti-rat insulin antibodies. Insulin secretion from pancreatic beta cells is upregulated by |
| | | | | glucose and also by certain proteins/peptides, and disregulation is a key component in diabetes. |
| | | | | Exemplary assays that may be used or routinely modified to test for stimulation of insulin secretion (from |
| | | | | pancreatic cells) by polypeptides of the invention (including antibodies and agonists or antagonists of the |
| | | | | invention) include assays disclosed in: Ahren, B., et al., Am J Physiol, 277(4 Pt 2): R959-66 (1999); Li, M., |
| | | | | et al., Endocrinology, 138(9): 3735-40 (1997); Kim, K. H., et al., FEBS Lett, 377(2): 237-9 (1995); |
| | | | | and, Miraglia S et. al., Journal of Biomolecular Screening, 4: 193-204 (1999), the contents of each of |
| | | | | which is herein incorporated by reference in its entirety. Pancreatic cells that may be used according to |
| | | | | these assays are publicly available (e.g., through the ATCC) and/or may be routinely generated. |
| | | | | Exemplary pancreatic cells that may be used according to these assays include rat INS-1 cells. INS-1 |
| | | | | cells are a semi-adherent cell line established from cells isolated from an X-ray induced rat transplantable |
| | | | | insulinoma. These cells retain characteristics typical of native pancreatic beta cells including glucose |
| | | | | inducible insulin secretion. References: Asfari et al. Endocrinology 1992 130: 167. |
| 98 | HMADK33 | 397 | Regulation of | Assays for the regulation of transcription through the PEPCK promoter are well-known in the art and |
| | | | transcription | may be used or routinely modified to assess the ability of polypeptides of the invention (including |
| | | | through the | antibodies and agonists or antagonists of the invention) to activate the PEPCK promoter in a reporter |
| | | | PEPCK | construct and regulate liver gluconeogenesis. Exemplary assays for regulation of transcription through |
| | | | promoter in | the PEPCK promoter that may be used or routinely modified to test for PEPCK promoter activity (in |
| | | | hepatocytes | hepatocytes) of polypeptides of the invention (including antibodies and agonists or antagonists of the |
| | | | | invention) include assays disclosed in Berger et al., Gene 66: 1-10 (1998); Cullen and Malm, Methods in |
| | | | | Enzymol 216: 362-368 (1992); Henthorn et al., Proc Natl Acad Sci USA 85: 6342-6346 (1988); Lochhead |
| | | | | et al., Diabetes 49(6): 896-903 (2000); and Yeagley et al., J Biol Chem 275(23): 17814-17820 (2000), the |
| | | | | contents of each of which is herein incorporated by reference in its entirety. Hepatocyte cells that may be |
| | | | | used according to these assays are publicly available (e.g., through the ATCC) and/or may be routinely |
| | | | | generated. Exemplary liver hepatoma cells that may be used according to these assays include H4lle |
| | | | | cells, which contain a tyrosine amino transferase that is inducible with glucocorticoids, insulin, or cAMP |
| | | | | derivatives. |
| 99 | HMAMI15 | 398 | Stimulation of | Assays for measuring calcium flux are well-known in the art and may be used or routinely modified to |
| | | | Calcium Flux in | assess the ability of polypeptides of the invention (including antibodies and agonists or antagonists of the |
| | | | pancreatic beta | invention) to mobilize calcium. For example, the FLPR assay may be used to measure influx of calcium. |
| | | | cells. | Cells normally have very low concentrations of cytosolic calcium compared to much higher extracellular |
| | | | | calcium. Extracellular factors can cause an influx of calcium, leading to activation of calcium responsive |
| | | | | signaling pathways and alterations in cell functions. Exemplary assays that may be used or routinely |
| | | | | modified to measure calcium flux by polypeptides of the invention (including antibodies and agonists or |
| | | | | antagonists of the invention) include assays disclosed in: Satin LS, et al., Endocrinology, 136(10): 4589-601 |
| | | | | (1995); Mogami H, et al., Endocrinology, 136(7): 2960-6 (1995); Richardson SB, et al., Biochem J, |
| | | | | 288 (Pt 3): 847-51 (1992); and, Meats, JE, et al., Cell Calcium 1989 Nov-Dec; 10(8): 535-41 (1989), the |
| | | | | contents of each of which is herein incorporated by reference in its entirety. Pancreatic cells that may be |
| | | | | used according to these assays are publicly available (e.g., through the ATCC) and/or may be routinely |
| | | | | generated. Exemplary pancreatic cells that may be used according to these assays include HITT15 Cells. |
| | | | | HITT15 are an adherent epithelial cell line established from Syrian hamster islet cells transformed with |
| | | | | SV40. These cells express glucagon, somatostatin, and glucocorticoid receptors. The cells secrete |
| | | | | insulin, which is stimulated by glucose and glucagon and suppressed by somatostatin or glucocorticoids. |
| | | | | ATTC# CRL-1777 Refs: Lord and Ashcroft. Biochem. J. 219: 547-551; Santerre et al. Proc. Natl. |
| | | | | Acad. Sci. USA 78: 4339-4343, 1981. |
| 99 | HMAMI15 | 398 | Upregulation of | CD152 FMAT. CD152 (a.k.a. CTLA-4) expression is restricted to activated T cells. CD152 is a |
| | | | CD152 and | negative regulator of T cell proliferation. Reduced CD152 expression has been linked to |
| | | | activation of T | hyperproliferative and autoimmune diseases. Overexpression of CD152 may lead to impaired |
| | | | cells | immunoresponses. Assays for immunomodulatory proteins important in the maintenance of T cell |
| | | | | homeostasis and expressed almost exclusively on CD4+ and CD8+ T cells are well known in the art and |
| | | | | may be used or routinely modified to assess the ability of polypeptides of the invention (including |
| | | | | antibodies and agonists or antagonists of the invention) to modulate the activation of T cells, maintain T |
| | | | | cell homeostasis, and/or mediate humoral or cell-mediated immunity. Exemplary assays that test for |
| | | | | immunomodulatory proteins evaluate the upregulation of cell surface markers, such as CD152, and the |
| | | | | activation of T cells. Such assays that may be used or routinely modified to test immunomodulatory |
| | | | | activity of polypeptides of the invention (including antibodies and agonists or antagonists of the |
| | | | | invention) include, for example, the assays disclosed in Miraglia et al., J Biomolecular Screening 4: 193-204 |
| | | | | (1999); Rowland et al., “Lymphocytes: a practical approach” Chapter 6: 138-160 (2000); McCoy et |
| | | | | al., Immunol Cell Biol 77(1): 1-10 (1999); Oostervegal et al., Curr Opin Immunol 11(3): 294-300 (1999); |
| | | | | and Saito T, Curr Opin Immunol 10(3): 313-321 (1998), the contents of each of which are herein |
| | | | | incorporated by reference in its entirety. Human T cells that may be used according to these assays may |
| | | | | be isolated using techniques disclosed herein or otherwise known in the art. Human T cells are primary |
| | | | | human lymphocytes that mature in the thymus and express a T Cell receptor and CD3, CD4, or CD8. |
| | | | | These cells mediate humoral or cell-mediated immunity and may be preactivated to enhance |
| | | | | responsiveness to immunomodulatory factors. |
| 100 | HMCFY13 | 399 | Regulation of | Assays for the regulation of transcription through the DMEF1 response element are well-known in the art |
| | | | transcription via | and may be used or routinely modified to assess the ability of polypeptides of the invention (including |
| | | | DMEF1 | antibodies and agonists or antagonists of the invention) to activate the DMEF1 response element in a |
| | | | response | reporter construct (such as that containing the GLUT4 promoter) and to regulate insulin production. The |
| | | | element in | DMEF1 response element is present in the GLUT4 promoter and binds to MEF2 transcription factor and |
| | | | adipocytes and | another transcription factor that is required for insulin regulation of Glut4 expression in skeletal muscle. |
| | | | pre-adipocytes | GLUT4 is the primary insulin-responsive glucose transporter in fat and muscle tissue. Exemplary assays |
| | | | | that may be used or routinely modified to test for DMEF1 response element activity (in adipocytes and |
| | | | | pre-adipocytes) by polypeptides of the invention (including antibodies and agonists or antagonists of the |
| | | | | invention) include assays disclosed inThai, M. V., et al., J Biol Chem, 273(23): 14285-92 (1998); Mora, S., |
| | | | | et al., J Biol Chem, 275(21): 16323-8 (2000); Liu, M. L., et al., J Biol Chem, 269(45): 28514-21 (1994); |
| | | | | “Identification of a 30-base pair regulatory element and novel DNA binding protein that regulates the |
| | | | | human GLUT4 promoter in transgenic mice”, J Biol Chem. 2000 Aug 4; 275(31): 23666-73; Berger, et al., |
| | | | | Gene 66: 1-10 (1988); and, Cullen, B., et al., Methods in Enzymol. 216: 362-368 (1992), the contents of |
| | | | | each of which is herein incorporated by reference in its entirety. Adipocytes and pre-adipocytes that may |
| | | | | be used according to these assays are publicly available (e.g., through the ATCC) and/or may be |
| | | | | routinely generated. Exemplary cells that may be used according to these assays include the mouse 3T3- |
| | | | | L1 cell line which is an adherent mouse preadipocyte cell line. Mouse 3T3-L1 cells are a continuous |
| | | | | substrain of 3T3 fibroblasts developed through clonal isolation. These cells undergo a pre-adipocyte to |
| | | | | adipose-like conversion under appropriate differentiation culture conditions. |
| 101 | HMDAB56 | 400 | Regulation of | Assays for the regulation of transcription through the PEPCK promoter are well-known in the art and |
| | | | transcription | may be used or routinely modified to assess the ability of polypeptides of the invention (including |
| | | | through the | antibodies and agonists or antagonists of the invention) to activate the PEPCK promoter in a reporter |
| | | | PEPCK | construct and regulate liver gluconeogenesis. Exemplary assays for regulation of transcription through |
| | | | promoter in | the PEPCK promoter that may be used or routinely modified to test for PEPCK promoter activity (in |
| | | | hepatocytes | hepatocytes) of polypeptides of the invention (including antibodies and agonists or antagonists of the |
| | | | | invention) include assays disclosed in Berger et al., Gene 66: 1-10 (1998); Cullen and Malm, Methods in |
| | | | | Enzymol 216: 362-368 (1992); Henthorn et al., Proc Natl Acad Sci USA 85: 6342-6346 (1988); Lochhead |
| | | | | et al., Diabetes 49(6): 896-903 (2000); and Yeagley et al., J Biol Chem 275(23): 17814-17820 (2000), the |
| | | | | contents of each of which is herein incorporated by reference in its entirety. Hepatocyte cells that may be |
| | | | | used according to these assays are publicly available (e.g., through the ATCC) and/or may be routinely |
| | | | | generated. Exemplary liver hepatoma cells that may be used according to these assays include H4lle |
| | | | | cells, which contain a tyrosine amino transferase that is inducible with glucocorticoids, insulin, or cAMP |
| | | | | derivatives. |
| 102 | HMEED18 | 401 | Production of | Assay to measure regulation of production of Interleukin-6 (IL-6) by either human aortic smooth muscle |
| | | | IL6 by primary | cells or normal human dermal fibroblasts minus or plus costimulation with TNFalpha (TNFa). Human |
| | | | human aortic | aortic smooth muscle cells or normal human dermal fibroblasts may be obtained from commercial |
| | | | smooth muscle | sources; these cells are important structural and functional components of blood vessels and connective |
| | | | or normal | tissue, respectiviely. Interleukin-6 (IL-6) is a key molecule in chronic inflammation and has been |
| | | | human dermal | implicated in the progression of atherosclerosis, stroke, arthritis and other vascular and inflammatory |
| | | | fibroblast cells | diseases. Deregulated expression of IL-6 has been linked to autoimmune disease, plasmacytomas, |
| | | | (without or with | myelomas, and chronic hyperproliferative diseases. Assays for immunomodulatory and differentiation |
| | | | costimulation | factor proteins produced by a large variety of cells where the expression level is strongly regulated by |
| | | | with TNFalpha). | cytokines, growth factors, and hormones are well known in the art and may be used or routinely modified |
| | | | | to assess the ability of polypeptides of the invention (including antibodies and agonists or antagonists of |
| | | | | the invention) to mediate immunomodulation and production of IL-6. |
| 102 | HMEED18 | 401 | Stimulation of | Assays for measuring calcium flux are well-known in the art and may be used or routinely modified to |
| | | | Calcium Flux in | assess the ability of polypeptides of the invention (including antibodies and agonists or antagonists of the |
| | | | pancreatic beta | invention) to mobilize calcium. For example, the FLPR assay may be used to measure influx of calcium. |
| | | | cells. | Cells normally have very low concentrations of cytosolic calcium compared to much higher extracellular |
| | | | | calcium. Extracellular factors can cause an influx of calcium, leading to activation of calcium responsive |
| | | | | signaling pathways and alterations in cell functions. Exemplary assays that may be used or routinely |
| | | | | modified to measure calcium flux by polypeptides of the invention (including antibodies and agonists or |
| | | | | antagonists of the invention) include assays disclosed in: Satin LS, et al., Endocrinology, 136(10): 4589-601 |
| | | | | (1995); Mogami H, et al., Endocrinology, 136(7): 2960-6 (1995); Richardson SB, et al., Biochem J, |
| | | | | 288 (Pt 3): 847-51 (1992); and, Meats, JE, et al., Cell Calcium 1989 Nov-Dec; 10(8): 535-41 (1989), the |
| | | | | contents of each of which is herein incorporated by reference in its entirety. Pancreatic cells that may be |
| | | | | used according to these assays are publicly available (e.g., through the ATCC) and/or may be routinely |
| | | | | generated. Exemplary pancreatic cells that may be used according to these assays include HITT15 Cells. |
| | | | | HITT15 are an adherent epithelial cell line established from Syrian hamster islet cells transformed with |
| | | | | SV40. These cells express glucagon, somatostatin, and glucocorticoid receptors. The cells secrete |
| | | | | insulin, which is stimulated by glucose and glucagon and suppressed by somatostatin or glucocorticoids. |
| | | | | ATTC# CRL-1777 Refs: Lord and Ashcroft. Biochem. J. 219: 547-551; Santerre et al. Proc. Natl. |
| | | | | Acad. Sci. USA 78: 4339-4343, 1981. |
| 102 | HMEED18 | 401 | Upregulation of | CD69 FMAT. CD69 is an activation marker that is expressed on activated T cells, B cells, and NK cells. |
| | | | CD69 and | CD69 is not expressed on resting T cells, B cells, or NK cells. CD69 has been found to be associated with |
| | | | activation of T cells | inflammation. Assays for immunomodulatory proteins expressed in T cells, B cells, and leukocytes are |
| | | | | well known in the art and may be used or routinely modified to assess the ability of polypeptides of the |
| | | | | invention (including antibodies and agonists or antagonists of the invention) to modulate the activation of |
| | | | | T cells, and/or mediate humoral or cell-mediated immunity. Exemplary assays that test for |
| | | | | immunomodulatory proteins evaluate the upregulation of cell surface markers, such as CD69, and the |
| | | | | activation of T cells. Such assays that may be used or routinely modified to test immunomodulatory |
| | | | | activity of polypeptides of the invention (including antibodies and agonists or antagonists of the |
| | | | | invention) include, for example, the assays disclosed in Miraglia et al., J Biomolecular Screening 4: 193-204 |
| | | | | (1999); Rowland et al., “Lymphocytes: a practical approach” Chapter 6: 138-160 (2000); Ferenczi et |
| | | | | al., J Autoimmun 14(1): 63-78 (200); Werfel et al., Allergy 52(4): 465-469 (1997); Taylor-Fishwick and |
| | | | | Siegel, Eur J Immunol 25(12): 3215-3221 (1995); and Afetra et al., Ann Rheum Dis 52(6): 457-460 |
| | | | | (1993), the contents of each of which are herein incorporated by reference in its entirety. Human T cells |
| | | | | that may be used according to these assays may be isolated using techniques disclosed herein or |
| | | | | otherwise known in the art. Human T cells are primary human lymphocytes that mature in the thymus |
| | | | | and express a T Cell receptor and CD3, CD4, or CD8. These cells mediate humoral or cell-mediated |
| | | | | immunity and may be preactivated to enhance responsiveness to immunomodulatory factors. |
| 103 | HMEFT54 | 402 | Regulation of | Caspase Apoptosis. Assays for caspase apoptosis are well known in the art and may be used or |
| | | | apoptosis in | routinely modified to assess the ability of polypeptides of the invention (including antibodies and |
| | | | pancreatic beta | agonists or antagonists of the invention) to promote caspase protease-mediated apoptosis. Apoptosis in |
| | | | cells. | pancreatic beta is associated with induction and progression of diabetes. Exemplary assays for caspase |
| | | | | apoptosis that may be used or routinely modified to test capase apoptosis activity of polypeptides of the |
| | | | | invention (including antibodies and agonists or antagonists of the invention) include the assays disclosed |
| | | | | in: Loweth, AC, et al., FEBS Lett, 400(3): 285-8 (1997); Saini, KS, et al., Biochem Mol Biol Int, |
| | | | | 39(6): 1229-36 (1996); Krautheim, A., et al., Br J Pharmacol, 129(4): 687-94 (2000); Chandra J, et al., |
| | | | | Diabetes, 50 Suppl 1: S44-7 (2001); Suk K, et al., J Immunol, 166(7): 4481-9 (2001); Tejedo J, et al., |
| | | | | FEBS Lett, 459(2): 238-43 (1999); Zhang, S., et al., FEBS Lett, 455(3): 315-20 (1999); Lee et al., FEBS |
| | | | | Lett 485(2-3): 122-126 (2000); Nor et al., J Vasc Res 37(3): 209-218 (2000); and Karsan and Harlan, J |
| | | | | Atheroscler Thromb 3(2): 75-80 (1996); the contents of each of which are herein incorporated by |
| | | | | reference in its entirety. Pancreatic cells that may be used according to these assays are publicly |
| | | | | available (e.g., through the ATCC) and/or may be routinely generated. Exemplary pancreatic cells that |
| | | | | may be used according to these assays include RIN-m. RIN-m is a rat adherent pancreatic beta cell |
| | | | | insulinoma cell line derived from a radiation induced transplantable rat islet cell tumor. The cells |
| | | | | produce and secrete islet polypeptide hormones, and produce insulin, somatostatin, and possibly |
| | | | | glucagon. ATTC: #CRL-2057 Chick et al. Proc. Natl. Acad. Sci. 1977 74: 628; AF et al. Proc. Natl. Acad. Sci. |
| | | | | 1980 77: 3519. |
| 104 | HMEGF92 | 403 | Production of | Endothelial cells, which are cells that line blood vessels, and are involved in functions that include, but |
| | | | ICAM in | are not limited to, angiogenesis, vascular permeability, vascular tone, and immune cell extravasation. |
| | | | endothelial cells | Exemplary endothelial cells that may be used in ICAM production assays include human umbilical vein |
| | | | (such as human | endothelial cells (HUVEC), and are available from commercial sources. The expression of ICAM |
| | | | umbilical vein | (CD54), a intergral membrane protein, can be upregulated by cytokines or other factors, and ICAM |
| | | | endothelial cells | expression is important in mediating immune and endothelial cell interactions leading to immune and |
| | | | (HUVEC)) | inflammatory responses. Assays for measuring expression of ICAM-1 are well-known in the art and may |
| | | | | be used or routinely modified to assess the ability of polypeptides of the invention (including antibodies |
| | | | | and agonists or antagonists of the invention) to regulate ICAM-1 expression. Exemplary assays that may |
| | | | | be used or routinely modified to measure ICAM-1 expression include assays disclosed in: Rolfe BE, et |
| | | | | al., Atherosclerosis, 149(1): 99-110 (2000); Panettieri RA Jr, et al., J Immunol, 154(5): 2358-2365 (1995); |
| | | | | and, Grunstein MM, et al., Am J Physiol Lung Cell Mol Physiol, 278(6): L1154-L1163 (2000), the |
| | | | | contents of each of which is herein incorporated by reference in its entirety. |
| 104 | HMEGF92 | 403 | Regulation of | Caspase Apoptosis. Assays for caspase apoptosis are well known in the art and may be used or |
| | | | apoptosis in | routinely modified to assess the ability of polypeptides of the invention (including antibodies and |
| | | | pancreatic beta | agonists or antagonists of the invention) to promote caspase protease-mediated apoptosis. Apoptosis in |
| | | | cells. | pancreatic beta is associated with induction and progression of diabetes. Exemplary assays for caspase |
| | | | | apoptosis that may be used or routinely modified to test capase apoptosis activity of polypeptides of the |
| | | | | invention (including antibodies and agonists or antagonists of the invention) include the assays disclosed |
| | | | | in: Loweth, AC, et al., FEBS Lett, 400(3): 285-8 (1997); Saini, KS, et al., Biochem Mol Biol Int, |
| | | | | 39(6): 1229-36 (1996); Krautheim, A., et al., Br J Pharmacol, 129(4): 687-94 (2000); Chandra J, et al., |
| | | | | Diabetes, 50 Suppl 1: S44-7 (2001); Suk K, et al., J Immunol, 166(7): 4481-9 (2001); Tejedo J, et al., |
| | | | | FEBS Lett, 459(2): 238-43 (1999); Zhang, S., et al., FEBS Lett, 455(3): 315-20 (1999); Lee et al., FEBS |
| | | | | Lett 485(2-3): 122-126 (2000); Nor et al., J Vasc Res 37(3): 209-218 (2000); and Karsan and Harlan, J |
| | | | | Atheroscler Thromb 3(2): 75-80 (1996); the contents of each of which are herein incorporated by |
| | | | | reference in its entirety. Pancreatic cells that may be used according to these assays are publicly |
| | | | | available (e.g., through the ATCC) and/or may be routinely generated. Exemplary pancreatic cells that |
| | | | | may be used according to these assays include RIN-m. RIN-m is a rat adherent pancreatic beta cell |
| | | | | insulinoma cell line derived from a radiation induced transplantable rat islet cell tumor. The cells |
| | | | | produce and secrete islet polypeptide hormones, and produce insulin, somatostatin, and possibly |
| | | | | glucagon. ATTC: #CRL-2057 Chick et al. Proc. Natl. Acad. Sci. 1977 74: 628; AF et al. Proc. Natl. |
| | | | | Acad. Sci. 1980 77: 3519. |
| 105 | HMSDL37 | 404 | Regulation of | Assays for the regulation of viability and proliferation of cells in vitro are well-known in the art and may |
| | | | viability and | be used or routinely modified to assess the ability of polypeptides of the invention (including antibodies |
| | | | proliferation of | and agonists or antagonists of the invention) to regulate viability and proliferation of pancreatic beta |
| | | | pancreatic beta | cells. For example, the Cell Titer-Glo luminescent cell viability assay measures the number of viable |
| | | | cells. | cells in culture based on quantitation of the ATP present which signals the presence of metabolically |
| | | | | active cells. Exemplary assays that may be used or routinely modified to test regulation of viability and |
| | | | | proliferation of pancreatic beta cells by polypeptides of the invention (including antibodies and agonists |
| | | | | or antagonists of the invention) include assays disclosed in: Friedrichsen BN, et al., Mol Endocrinol, |
| | | | | 15(1): 136-48 (2001); Huotari MA, et al., Endocrinology, 139(4): 1494-9 (1998); Hugl SR, et al., J Biol |
| | | | | Chem 1998 Jul 10; 273(28): 17771-9 (1998), the contents of each of which is herein incorporated by |
| | | | | reference in its entirety. Pancreatic cells that may be used according to these assays are publicly |
| | | | | available (e.g., through the ATCC) and/or may be routinely generated. Exemplary pancreatic cells that |
| | | | | may be used according to these assays include rat INS-1 cells. INS-1 cells are a semi-adherent cell line |
| | | | | established from cells isolated from an X-ray induced rat transplantable insulinoma. These cells retain |
| | | | | characteristics typical of native pancreatic beta cells including glucose inducible insulin secretion. |
| | | | | References: Asfari et al. Endocrinology 1992 130: 167. |
| 106 | HMSFI26 | 405 | Stimulation of | Assays for measuring secretion of insulin are well-known in the art and may be used or routinely |
| | | | insulin secretion | modified to assess the ability of polypeptides of the invention (including antibodies and agonists or |
| | | | from pancreatic | antagonists of the invention) to stimulate insulin secretion. For example, insulin secretion is measured by |
| | | | beta cells. | FMAT using anti-rat insulin antibodies. Insulin secretion from pancreatic beta cells is upregulated by |
| | | | | glucose and also by certain proteins/peptides, and disregulation is a key component in diabetes. |
| | | | | Exemplary assays that may be used or routinely modified to test for stimulation of insulin secretion (from |
| | | | | pancreatic cells) by polypeptides of the invention (including antibodies and agonists or antagonists of the |
| | | | | invention) include assays disclosed in: Ahren, B., et al., Am J Physiol, 277(4 Pt 2): R959-66 (1999); Li, M., |
| | | | | et al., Endocrinology, 138(9): 3735-40 (1997); Kim, K. H., et al., FEBS Lett, 377(2): 237-9 (1995); |
| | | | | and, Miraglia S et. al., Journal of Biomolecular Screening, 4: 193-204 (1999), the contents of each of |
| | | | | which is herein incorporated by reference in its entirety. Pancreatic cells that may be used according to |
| | | | | these assays are publicly available (e.g., through the ATCC) and/or may be routinely generated. |
| | | | | Exemplary pancreatic cells that may be used according to these assays include rat INS-1 cells. INS-1 |
| | | | | cells are a semi-adherent cell line established from cells isolated from an X-ray induced rat transplantable |
| | | | | insulinoma. These cells retain characteristics typical of native pancreatic beta cells including glucose |
| | | | | inducible insulin secretion. References: Asfari et al. Endocrinology 1992 130: 167. |
| 107 | HMVBS81 | 406 | Stimulation of | Assays for measuring secretion of insulin are well-known in the art and may be used or routinely |
| | | | insulin secretion | modified to assess the ability of polypeptides of the invention (including antibodies and agonists or |
| | | | from pancreatic | antagonists of the invention) to stimulate insulin secretion. For example, insulin secretion is measured by |
| | | | beta cells. | FMAT using anti-rat insulin antibodies. Insulin secretion from pancreatic beta cells is upregulated by |
| | | | | glucose and also by certain proteins/peptides, and disregulation is a key component in diabetes. |
| | | | | Exemplary assays that may be used or routinely modified to test for stimulation of insulin secretion (from |
| | | | | pancreatic cells) by polypeptides of the invention (including antibodies and agonists or antagonists of the |
| | | | | invention) include assays disclosed in: Ahren, B., et al., Am J Physiol, 277(4 Pt 2): R959-66 (1999); Li, M., |
| | | | | et al., Endocrinology, 138(9): 3735-40 (1997); Kim, K. H., et al., FEBS Lett, 377(2): 237-9 (1995); |
| | | | | and, Miraglia S et. al., Journal of Biomolecular Screening, 4: 193-204 (1999), the contents of each of |
| | | | | which is herein incorporated by reference in its entirety. Pancreatic cells that may be used according to |
| | | | | these assays are publicly available (e.g., through the ATCC) and/or may be routinely generated. |
| | | | | Exemplary pancreatic cells that may be used according to these assays include rat INS-1 cells. INS-1 |
| | | | | cells are a semi-adherent cell line established from cells isolated from an X-ray induced rat transplantable |
| | | | | insulinoma. These cells retain characteristics typical of native pancreatic beta cells including glucose |
| | | | | inducible insulin secretion. References: Asfari et al. Endocrinology 1992 130: 167. |
| 108 | HMWDC28 | 407 | Stimulation of | Assays for measuring secretion of insulin are well-known in the art and may be used or routinely |
| | | | insulin secretion | modified to assess the ability of polypeptides of the invention (including antibodies and agonists or |
| | | | from pancreatic | antagonists of the invention) to stimulate insulin secretion. For example, insulin secretion is measured by |
| | | | beta cells. | FMAT using anti-rat insulin antibodies. Insulin secretion from pancreatic beta cells is upregulated by |
| | | | | glucose and also by certain proteins/peptides, and disregulation is a key component in diabetes. |
| | | | | Exemplary assays that may be used or routinely modified to test for stimulation of insulin secretion (from |
| | | | | pancreatic cells) by polypeptides of the invention (including antibodies and agonists or antagonists of the |
| | | | | invention) include assays disclosed in: Ahren, B., et al., Am J Physiol, 277(4 Pt 2): R959-66 (1999); Li, M., |
| | | | | et al., Endocrinology, 138(9): 3735-40 (1997); Kim, K. H., et al., FEBS Lett, 377(2): 237-9 (1995); |
| | | | | and, Miraglia S et. al., Journal of Biomolecular Screening, 4: 193-204 (1999), the contents of each of |
| | | | | which is herein incorporated by reference in its entirety. Pancreatic cells that may be used according to |
| | | | | these assays are publicly available (e.g., through the ATCC) and/or may be routinely generated. |
| | | | | Exemplary pancreatic cells that may be used according to these assays include rat INS-1 cells. INS-1 |
| | | | | cells are a semi-adherent cell line established from cells isolated from an X-ray induced rat transplantable |
| | | | | insulinoma. These cells retain characteristics typical of native pancreatic beta cells including glucose |
| | | | | inducible insulin secretion. References: Asfari et al. Endocrinology 1992 130: 167. |
| 109 | HMWFT65 | 408 | Regulation of | Assays for the regulation of transcription through the DMEF1 response element are well-known in the art |
| | | | transcription via | and may be used or routinely modified to assess the ability of polypeptides of the invention (including |
| | | | DMEF1 | antibodies and agonists or antagonists of the invention) to activate the DMEF1 response element in a |
| | | | response | reporter construct (such as that containing the GLUT4 promoter) and to regulate insulin production. The |
| | | | element in | DMEF1 response element is present in the GLUT4 promoter and binds to MEF2 transcription factor and |
| | | | adipocytes and | another transcription factor that is required for insulin regulation of Glut4 expression in skeletal muscle. |
| | | | pre-adipocytes | GLUT4 is the primary insulin-responsive glucose transporter in fat and muscle tissue. Exemplary assays |
| | | | | that may be used or routinely modified to test for DMEF1 response element activity (in adipocytes and |
| | | | | pre-adipocytes) by polypeptides of the invention (including antibodies and agonists or antagonists of the |
| | | | | invention) include assays disclosed inThai, M. V., et al., J Biol Chem, 273(23): 14285-92 (1998); Mora, S., |
| | | | | et al., J Biol Chem, 275(21): 16323-8 (2000); Liu, M. L., et al., J Biol Chem, 269(45): 28514-21 (1994); |
| | | | | “Identification of a 30-base pair regulatory element and novel DNA binding protein that regulates the |
| | | | | human GLUT4 promoter in transgenic mice”, J Biol Chem. 2000 Aug 4; 275(31): 23666-73; Berger, et al., |
| | | | | Gene 66: 1-10 (1988); and, Cullen, B., et al., Methods in Enzymol. 216: 362-368 (1992), the contents of |
| | | | | each of which is herein incorporated by reference in its entirety. Adipocytes and pre-adipocytes that may |
| | | | | be used according to these assays are publicly available (e.g., through the ATCC) and/or may be |
| | | | | routinely generated. Exemplary cells that may be used according to these assays include the mouse 3T3- |
| | | | | L1 cell line which is an adherent mouse preadipocyte cell line. Mouse 3T3-L1 cells are a continuous |
| | | | | substrain of 3T3 fibroblasts developed through clonal isolation. These cells undergo a pre-adipocyte to |
| | | | | adipose-like conversion under appropriate differentiation culture conditions. |
| 110 | HNEEE24 | 409 | Insulin | Assays for measuring secretion of insulin are well-known in the art and may be used or routinely |
| | | | Secretion | modified to assess the ability of polypeptides of the invention (including antibodies and agonists or |
| | | | | antagonists of the invention) to stimulate insulin secretion. For example, insulin secretion is measured by |
| | | | | FMAT using anti-rat insulin antibodies. Insulin secretion from pancreatic beta cells is upregulated by |
| | | | | glucose and also by certain proteins/peptides, and disregulation is a key component in diabetes. |
| | | | | Exemplary assays that may be used or routinely modified to test for stimulation of insulin secretion (from |
| | | | | pancreatic cells) by polypeptides of the invention (including antibodies and agonists or antagonists of the |
| | | | | invention) include assays disclosed in: Shimizu, H., et al., Endocr J, 47(3): 261-9 (2000); Salapatek, A. M., |
| | | | | et al., Mol Endocrinol, 13(8): 1305-17 (1999); Filipsson, K., et al., Ann N Y Acad Sci, 865: 441-4 |
| | | | | (1998); Olson, L. K., et al., J Biol Chem, 271(28): 16544-52 (1996); and, Miraglia S et. al., Journal of |
| | | | | Biomolecular Screening, 4: 193-204 (1999), the contents of each of which is herein incorporated by |
| | | | | reference in its entirety. Pancreatic cells that may be used according to these assays are publicly |
| | | | | available (e.g., through the ATCC) and/or may be routinely generated. Exemplary pancreatic cells that |
| | | | | may be used according to these assays include HITT15 Cells. HITT15 are an adherent epithelial cell line |
| | | | | established from Syrian hamster islet cells transformed with SV40. These cells express glucagon, |
| | | | | somatostatin, and glucocorticoid receptors. The cells secrete insulin, which is stimulated by glucose and |
| | | | | glucagon and suppressed by somatostatin or glucocorticoids. ATTC# CRL-1777 Refs: Lord and |
| | | | | Ashcroft. Biochem. J. 219: 547-551; Santerre et al. Proc. Natl. Acad. Sci. USA 78: 4339-4343, 1981. |
| 111 | HNFFC43 | 410 | Regulation of | Assays for the regulation of transcription through the DMEF1 response element are well-known in the art |
| | | | transcription via | and may be used or routinely modified to assess the ability of polypeptides of the invention (including |
| | | | DMEF1 | antibodies and agonists or antagonists of the invention) to activate the DMEF1 response element in a |
| | | | response | reporter construct (such as that containing the GLUT4 promoter) and to regulate insulin production. The |
| | | | element in | DMEF1 response element is present in the GLUT4 promoter and binds to MEF2 transcription factor and |
| | | | adipocytes and | another transcription factor that is required for insulin regulation of Glut4 expression in skeletal muscle. |
| | | | pre-adipocytes | GLUT4 is the primary insulin-responsive glucose transporter in fat and muscle tissue. Exemplary assays |
| | | | | that may be used or routinely modified to test for DMEF1 response element activity (in adipocytes and |
| | | | | pre-adipocytes) by polypeptides of the invention (including antibodies and agonists or antagonists of the |
| | | | | invention) include assays disclosed inThai, M. V., et al., J Biol Chem, 273(23): 14285-92 (1998); Mora, S., |
| | | | | et al., J Biol Chem, 275(21): 16323-8 (2000); Liu, M. L., et al., J Biol Chem, 269(45): 28514-21 (1994); |
| | | | | “Identification of a 30-base pair regulatory element and novel DNA binding protein that regulates the |
| | | | | human GLUT4 promoter in transgenic mice”, J Biol Chem. 2000 Aug 4; 275(31): 23666-73; Berger, et al., |
| | | | | Gene 66: 1-10 (1988); and, Cullen, B., et al., Methods in Enzymol. 216: 362-368 (1992), the contents of |
| | | | | each of which is herein incorporated by reference in its entirety. Adipocytes and pre-adipocytes that may |
| | | | | be used according to these assays are publicly available (e.g., through the ATCC) and/or may be |
| | | | | routinely generated. Exemplary cells that may be used according to these assays include the mouse 3T3- |
| | | | | L1 cell line which is an adherent mouse preadipocyte cell line. Mouse 3T3-L1 cells are a continuous |
| | | | | substrain of 3T3 fibroblasts developed through clonal isolation. These cells undergo a pre-adipocyte to |
| | | | | adipose-like conversion under appropriate differentiation cultute conditions. |
| 111 | HNFFC43 | 410 | Proliferation of | Assays for the regulation (i.e. increases or decreases) of viability and proliferation of cells in vitro are |
| | | | immune cells | well-known in the art and may be used or routinely modified to assess the ability of polypeptides of the |
| | | | (such as the | invention (including antibodies and agonists or antagonists of the invention) to regulate viability and |
| | | | HMC-1 human | proliferation of eosinophil cells and cell lines. For example, the CellTiter-Gloo Luminescent Cell |
| | | | mast cell line) | Viability Assay (Promega Corp., Madison, WI, USA) can be used to measure the number of viable cells |
| | | | | in culture based on quantitation of the ATP present which signals the presence of metabolically active |
| | | | | cells. Mast cells are found in connective and mucosal tissues throughout the body. Mast cell activation |
| | | | | (via immunoglobulin E-antigen, promoted by T helper cell type 2 cytokines) is an important component |
| | | | | of allergic disease. Dysregulation of mast cell apoptosis may play a role in allergic disease and mast cell |
| | | | | tumor survival. Mast cell lines that may be used according to these assays are publicly available and/or |
| | | | | may be routinely generated. Exemplary mast cells that may be used according to these assays include |
| | | | | HMC-1, which is an immature human mast cell line established from the peripheral blood of a patient |
| | | | | with mast cell leukemia, and exhibits many characteristics of immature mast cells. |
| 111 | HNFFC43 | 410 | Activation of T- | Kinase assay. JNK and p38 kinase assays for signal transduction that regulate cell proliferation, |
| | | | Cell p38 or JNK | activation, or apoptosis are well known in the art and may be used or routinely modified to assess the |
| | | | Signaling | ability of polypeptides of the invention (including antibodies and agonists or antagonists of the invention) |
| | | | Pathway. | to promote or inhibit immune cell (e.g. T-cell) proliferation, activation, and apoptosis. Exemplary assays |
| | | | | for JNK and p38 kinase activity that may be used or routinely modified to test JNK and p38 kinase- |
| | | | | induced activity of polypeptides of the invention (including antibodies and agonists or antagonists of the |
| | | | | invention) include the assays disclosed in Forrer et al., Biol Chem 379(8-9): 1101-1110 (1998); Gupta et |
| | | | | al., Exp Cell Res 247(2): 495-504 (1999); Kyriakis JM, Biochem Soc Symp 64: 29-48 (1999); Chang and |
| | | | | Karin, Nature 410(6824): 37-40 (2001); and Cobb MH, Prog Biophys Mol Biol 71(3-4): 479-500 (1999); |
| | | | | the contents of each of which are herein incorporated by reference in its entirety. T cells that may be |
| | | | | used according to these assays are publicly available (e.g., through the ATCC). Exemplary mouse T cells |
| | | | | that may be used according to these assays include the CTLL cell line, which is an IL-2 dependent |
| | | | | suspension-culture cell line with cytotoxic activity. |
| 111 | HNFFC43 | 410 | Regulation of | Assays for the regulation of transcription of Malic Enzyme are well-known in the art and may be used or |
| | | | transcription of | routinely modified to assess the ability of polypeptides of the invention (including antibodies and |
| | | | Malic Enzyme | agonists or antagonists of the invention) to regulate transcription of Malic Enzyme, a key enzyme in |
| | | | in adipocytes | lipogenesis. Malic enzyme is involved in lipogenesis and its expression is stimulted by insulin. ME |
| | | | | promoter contains two direct repeat (DR1)-like elements MEp and MEd identified as putative PPAR |
| | | | | response elements. ME promoter may also responds to AP1 and other transcription factors. Exemplary |
| | | | | assays that may be used or routinely modified to test for regulation of transcription of Malic Enzyme (in |
| | | | | adipoocytes) by polypeptides of the invention (including antibodies and agonists or antagonists of the |
| | | | | invention) include assays disclosed in: Streeper, R. S., et al., Mol Endocrinol, 12(11): 1778-91 (1998); |
| | | | | Garcia-Jimenez, C., et al., Mol Endocrinol, 8(10): 1361-9 (1994); Barroso, I., et al., J Biol Chem, |
| | | | | 274(25): 17997-8004 (1999); Ijpenberg, A., et al., J Biol Chem, 272(32): 20108-20117 (1997); Berger, et |
| | | | | al., Gene 66: 1-10 (1988); and, Cullen, B., et al., Methods in Enzymol. 216: 362-368 (1992), the contents |
| | | | | of each of which is herein incorporated by reference in its entirety. Hepatocytes that may be used |
| | | | | according to these assays are publicly available (e.g., through the ATCC) and/or may be routinely |
| | | | | generated. Exemplary hepatocytes that may be used according to these assays includes the H4IIE rat |
| | | | | liver hepatoma cell line. |
| 112 | HNFIY77 | 411 | Insulin | Assays for measuring secretion of insulin are well-known in the art and may be used or routinely |
| | | | Secretion | modified to assess the ability of polypeptides of the invention (including antibodies and agonists or |
| | | | | antagonists of the invention) to stimulate insulin secretion. For example, insulin secretion is measured by |
| | | | | FMAT using anti-rat insulin antibodies. Insulin secretion from pancreatic beta cells is upregulated by |
| | | | | glucose and also by certain proteins/peptides, and disregulation is a key component in diabetes. |
| | | | | Exemplary assays that may be used or routinely modified to test for stimulation of insulin secretion (from |
| | | | | pancreatic cells) by polypeptides of the invention (including antibodies and agonists or antagonists of the |
| | | | | invention) include assays disclosed in: Shimizu, H., et al., Endocr J, 47(3): 261-9 (2000); Salapatek, A. M., |
| | | | | et al., Mol Endocrinol, 13(8): 1305-17 (1999); Filipsson, K., et al., Ann N Y Acad Sci, 865: 441-4 |
| | | | | (1998); Olson, L. K., et al., J Biol Chem, 271(28): 16544-52 (1996); and, Miraglia S et. al., Journal of |
| | | | | Biomolecular Screening, 4: 193-204 (1999), the contents of each of which is herein incorporated by |
| | | | | reference in its entirety. Pancreatic cells that may be used according to these assays are publicly |
| | | | | available (e.g., through the ATCC) and/or may be routinely generated. Exemplary pancreatic cells that |
| | | | | may be used according to these assays include HITT15 Cells. HITT15 are an adherent epithelial cell line |
| | | | | established from Syrian hamster islet cells transformed with SV40. These cells express glucagon, |
| | | | | somatostatin, and glucocorticoid receptors. The cells secrete insulin, which is stimulated by glucose and |
| | | | | glucagon and suppressed by somatostatin or glucocorticoids. ATTC# CRL-1777 Refs: Lord and |
| | | | | Ashcroft. Biochem. J. 219: 547-551; Santerre et al. Proc. Natl. Acad. Sci. USA 78: 4339-4343, 1981. |
| 113 | HNFJF07 | 412 | Regulation of | Assays for the regulation of transcription through the DMEF1 response element are well-known in the art |
| | | | transcription via | and may be used or routinely modified to assess the ability of polypeptides of the invention (including |
| | | | DMEF1 | antibodies and agonists or antagonists of the invention) to activate the DMEF1 response element in a |
| | | | response | reporter construct (such as that containing the GLUT4 promoter) and to regulate insulin production. The |
| | | | element in | DMEF1 response element is present in the GLUT4 promoter and binds to MEF2 transcription factor and |
| | | | adipocytes and | another transcription factor that is required for insulin regulation of Glut4 expression in skeletal muscle. |
| | | | pre-adipocytes | GLUT4 is the primary insulin-responsive glucose transporter in fat and muscle tissue. Exemplary assays |
| | | | | that may be used or routinely modified to test for DMEF1 response element activity (in adipocytes and |
| | | | | pre-adipocytes) by polypeptides of the invention (including antibodies and agonists or antagonists of the |
| | | | | invention) include assays disclosed inThai, M. V., et al., J Biol Chem, 273(23): 14285-92 (1998); Mora, S., |
| | | | | et al., J Biol Chem, 275(21): 16323-8 (2000); Liu, M. L., et al., J Biol Chem, 269(45): 28514-21 (1994); |
| | | | | “Identification of a 30-base pair regulatory element and novel DNA binding protein that regulates the |
| | | | | human GLUT4 promoter in transgenic mice”, J Biol Chem. 2000 Aug 4; 275(31): 23666-73; Berger, et al., |
| | | | | Gene 66: 1-10 (1988); and, Cullen, B., et al., Methods in Enzymol. 216: 362-368 (1992), the contents of |
| | | | | each of which is herein incorporated by reference in its entirety. Adipocytes and pre-adipocytes that may |
| | | | | be used according to these assays are publicly available (e.g., through the ATCC) and/or may be |
| | | | | routinely generated. Exemplary cells that may be used according to these assays include the mouse 3T3- |
| | | | | L1 cell line which is an adherent mouse preadipocyte cell line. Mouse 3T3-L1 cells are a continuous |
| | | | | substrain of 3T3 fibroblasts developed through clonal isolation. These cells undergo a pre-adipocyte to |
| | | | | adipose-like conversion under appropriate differentiation culture conditions. |
| 113 | HNFJF07 | 412 | Regulation of | Assays for the regulation of viability and proliferation of cells in vitro are well-known in the art and may |
| | | | viability and | be used or routinely modified to assess the ability of polypeptides of the invention (including antibodies |
| | | | proliferation of | and agonists or antagonists of the invention) to regulate viability and proliferation of pancreatic beta |
| | | | pancreatic beta cells. | cells. For example, the Cell Titer-Glo luminescent cell viability assay measures the number of viable |
| | | | | cells in culture based on quantitation of the ATP present which signals the presence of metabolically |
| | | | | active cells. Exemplary assays that may be used or routinely modified to test regulation of viability and |
| | | | | proliferation of pancreatic beta cells by polypeptides of the invention (including antibodies and agonists |
| | | | | or antagonists of the invention) include assays disclosed in: Friedrichsen BN, et al., Mol Endocrinol, |
| | | | | 15(1): 136-48 (2001); Huotari MA, et al., Endocrinology, 139(4): 1494-9 (1998); Hugl SR, et al., J Biol |
| | | | | Chem 1998 Jul 10; 273(28): 17771-9 (1998), the contents of each of which is herein incorporated by |
| | | | | reference in its entirety. Pancreatic cells that may be used according to these assays are publicly |
| | | | | available (e.g., through the ATCC) and/or may be routinely generated. Exemplary pancreatic cells that |
| | | | | may be used according to these assays include rat INS-1 cells. INS-1 cells are a semi-adherent cell line |
| | | | | established from cells isolated from an X-ray induced rat transplantable insulinoma. These cells retain |
| | | | | characteristics typical of native pancreatic beta cells including glucose inducible insulin secretion. |
| | | | | References: Asfari et al. Endocrinology 1992 130: 167. |
| 113 | HNFJF07 | 412 | Activation of | Assays for the activation of transcription through the Serum Response Element (SRE) are well-known in |
| | | | transcription | the art and may be used or routinely modified to assess the ability of polypeptides of the invention |
| | | | through serum | (including antibodies and agonists or antagonists of the invention) to regulate the serum response factors |
| | | | response | and modulate the expression of genes involved in growth. Exemplary assays for transcription through |
| | | | element in | the SRE that may be used or routinely modified to test SRE activity of the polypeptides of the invention |
| | | | immune cells | (including antibodies and agonists or antagonists of the invention) include assays disclosed in Berger et |
| | | | (such as T- | al., Gene 66: 1-10 (1998); Cullen and Malm, Methods in Enzymol 216: 362-368 (1992); Henthorn et al., |
| | | | cells). | Proc Natl Acad Sci USA 85: 6342-6346 (1988); and Black et al., Virus Genes 12(2): 105-117 (1997), the |
| | | | | content of each of which are herein incorporated by reference in its entirety. T cells that may be used |
| | | | | according to these assays are publicly available (e.g., through the ATCC). Exemplary mouse T cells that |
| | | | | may be used according to these assays include the CTLL cell line, which is an IL-2 dependent suspension |
| | | | | culture of T cells with cytotoxic activity. |
| 113 | HNFJ07 | 412 | Stimulation of | Assays for measuring secretion of insulin are well-known in the art and may be used or routinely |
| | | | insulin secretion | modified to assess the ability of polypeptides of the invention (including antibodies and agonists or |
| | | | from pancreatic | antagonists of the invention) to stimulate insulin secretion. For example, insulin secretion is measured by |
| | | | beta cells. | FMAT using anti-rat insulin antibodies. Insulin secretion from pancreatic beta cells is upregulated by |
| | | | | glucose and also by certain proteins/peptides, and disregulation is a key component in diabetes. |
| | | | | Exemplary assays that may be used or routinely modified to test for stimulation of insulin secretion (from |
| | | | | pancreatic cells) by polypeptides of the invention (including antibodies and agonists or antagonists of the |
| | | | | invention) include assays disclosed in: Ahren, B., et al., Am J Physiol, 277(4 Pt 2): R959-66 (1999); Li, M., |
| | | | | et al., Endocrinology, 138(9): 3735-40 (1997); Kim, K. H., et al., FEBS Lett, 377(2): 237-9 (1995); |
| | | | | and, Miraglia S et. al., Journal of Biomolecular Screening, 4: 193-204 (1999), the contents of each of |
| | | | | which is herein incorporated by reference in its entirety. Pancreatic cells that may be used according to |
| | | | | these assays are publicly available (e.g., through the ATCC) and/or may be routinely generated. |
| | | | | Exemplary pancreatic cells that may be used according to these assays include rat INS-1 cells. INS-1 |
| | | | | cells are a semi-adherent cell line established from cells isolated from an X-ray induced rat transplantable |
| | | | | insulinoma. These cells retain characteristics typical of native pancreatic beta cells including glucose |
| | | | | inducible insulin secretion. References: Asfari et al. Endocrinology 1992 130: 167. |
| 114 | HNGFR31 | 413 | Insulin | Assays for measuring secretion of insulin are well-known in the art and may be used or routinely |
| | | | Secretion | modified to assess the ability of polypeptides of the invention (including antibodies and agonists or |
| | | | | antagonists of the invention) to stimulate insulin secretion. For example, insulin secretion is measured by |
| | | | | FMAT using anti-rat insulin antibodies. Insulin secretion from pancreatic beta cells is upregulated by |
| | | | | glucose and also by certain proteins/peptides, and disregulation is a key component in diabetes. |
| | | | | Exemplary assays that may be used or routinely modified to test for stimulation of insulin secretion (from |
| | | | | pancreatic cells) by polypeptides of the invention (including antibodies and agonists or antagonists of the |
| | | | | invention) include assays disclosed in: Shimizu, H., et al., Endocr J, 47(3): 261-9 (2000); Salapatek, A. M., |
| | | | | et al., Mol Endocrinol, 13(8): 1305-17 (1999); Filipsson, K., et al., Ann N Y Acad Sci, 865: 441-4 |
| | | | | (1998); Olson, L. K., et al., J Biol Chem, 271(28): 16544-52 (1996); and, Miraglia S et. al., Journal of |
| | | | | Biomolecular Screening, 4: 193-204 (1999), the contents of each of which is herein incorporated by |
| | | | | reference in its entirety. Pancreatic cells that may be used according to these assays are publicly |
| | | | | available (e.g, through the ATCC) and/or may be routinely generated. Exemplary pancreatic cells that |
| | | | | may be used according to these assays include HITT15 Cells. HITT15 are an adherent epithelial cell line |
| | | | | established from Syrian hamster islet cells transformed with SV40. These cells express glucagon, |
| | | | | somatostatin, and glucocorticoid receptors. The cells secrete insulin, which is stimulated by glucose and |
| | | | | glucagon and suppressed by somatostatin or glucocorticoids. ATTC# CRL-1777 Refs: Lord and |
| | | | | Ashcroft. Biochem. J. 219: 547-551; Santerre et al. Proc. Natl. Acad. Sci. USA 78: 4339-4343, 1981. |
| 115 | HNGIJ31 | 414 | Activation of | Assays for the activation of transcription through the cAMP response element are well-known in the art |
| | | | transcription | and may be used or routinely modified to assess the ability of polypeptides of the invention (including |
| | | | through cAMP | antibodies and agonists or antagonists of the invention) to increase cAMP and regulate CREB |
| | | | response | transcription factors, and modulate expression of genes involved in a wide variety of cell functions. |
| | | | element in | Exemplary assays for transcription through the cAMP response element that may be used or routinely |
| | | | immune cells | modified to test cAMP-response element activity of polypeptides of the invention (including antibodies |
| | | | (such as T- | and agonists or antagonists of the invention) include assays disclosed in Berger et al., Gene 66: 1-10 |
| | | | cells). | (1998); Cullen and Malm, Methods in Enzymol 216: 362-368 (1992); Henthorn et al., Proc Natl Acad Sci |
| | | | | USA 85: 6342-6346 (1988); Black et al., Virus Genes 15(2): 105-117 (1997); and Bellcowski et al., J |
| | | | | Immunol 161(2): 659-665 (1998), the contents of each of which are herein incorporated by reference in its |
| | | | | entirety. T cells that may be used according to these assays are publicly available (e.g., through the |
| | | | | ATCC). Exemplary mouse T cells that may be used according to these assays include the CTLL cell |
| | | | | line, which is a suspension culture of IL-2 dependent cytotoxic T cells. |
| 115 | HNGIJ31 | 414 | Production of | MCP-1 FMAT. Assays for immunomodulatory proteins that are produced by a large variety of cells and |
| | | | MCP-1 | act to induce chemotaxis and activation of monocytes and T cells are well known in the art and may be |
| | | | | used or routinely modified to assess the ability of polypeptides of the invention (including antibodies and |
| | | | | agonists or antagonists of the invention) to mediate immunomodulatrion, induce chemotaxis, and |
| | | | | modulate immune cell activation. Exemplary assays that test for immunomodulatory proteins evaluate |
| | | | | the production of cell surface markers, such as monocyte chemoattractant protein (MCP), and the |
| | | | | activation of monocytes and T cells. Such assays that may be used or routinely modified to test |
| | | | | immunomodulatory and diffferentiation activity of polypeptides of the invention (including antibodies |
| | | | | and agonists or antagonists of the invention) include assays disclosed in Miraglia et at, J Biomolecular |
| | | | | Screening 4: 193-204(1999); Rowland et al., “Lymphocytes: a practical approach” Chapter 6: 138-160 |
| | | | | (2000); Satthaporn and Eremin, J R Coll Surg Ednb 45(1): 9-19 (2001); and Verhasselt et al., J Immunol |
| | | | | 158: 2919-2925 (1997), the contents of each of which are herein incorporated by reference in its entirety. |
| | | | | Human dendritic cells that may be used according to these assays may be isolated using techniques |
| | | | | disclosed herein or otherwise known in the art. Human dendritic cells are antigen presenting cells in |
| | | | | suspension culture, which, when activated by antigen and/or cytokines, initiate and upregulate T cell |
| | | | | proliferation and functional activities. |
| 115 | HNGIJ31 | 414 | Stimulation of | Assays for measuring secretion of insulin are well-known in the art and may be used or routinely |
| | | | insulin secretion | modified to assess the ability of polypeptides of the invention (including antibodies and agonists or |
| | | | from pancreatic | antagonists of the invention) to stimulate insulin secretion. For example, insulin secretion is measured by |
| | | | beta cells. | FMAT using anti-rat insulin antibodies. Insulin secretion from pancreatic beta cells is upregulated by |
| | | | | glucose and also by certain proteins/peptides, and disregulation is a key component in diabetes. |
| | | | | Exemplary assays that may be used or routinely modified to test for stimulation of insulin secretion (from |
| | | | | pancreatic cells) by polypeptides of the invention (including antibodies and agonists or antagonists of the |
| | | | | invention) include assays disclosed in: Ahren, B., et al., Am J Physiol, 277(4 Pt 2): R959-66 (1999); Li, M., |
| | | | | et al., Endocrinology, 138(9): 3735-40 (1997); Kim, K. H., et al., FEBS Lett, 377(2): 237-9 (1995); |
| | | | | and, Miraglia S et. al., Journal of Biomolecular Screening, 4: 193-204 (1999), the contents of each of |
| | | | | which is herein incorporated by reference in its entirety. Pancreatic cells that may be used according to |
| | | | | these assays are publicly available (e.g., through the ATCC) and/or may be routinely generated. |
| | | | | Exemplary pancreatic cells that may be used according to these assays include rat INS-1 cells. INS-1 |
| | | | | cells are a semi-adherent cell line established from cells isolated from an X-ray induced rat transplantable |
| | | | | insulinoma. These cells retain characteristics typical of native pancreatic beta cells including glucose |
| | | | | inducible insulin secretion. References: Asfari et al. Endocrinology 1992 130: 167. |
| 115 | HNGIJ31 | 414 | Activation of | Kinase assay, Kinase assays, for example an GSK-3 kinase assay, for PI3 kinase signal transduction that |
| | | | Skeletal Mucle | regulate glucose metabolism and cell survivial are well-known in the art and may be used or routinely |
| | | | Cell PI3 Kinase | modified to assess the ability of polypeptides of the invention (including antibodies and agonists or |
| | | | Signalling | antagonists of the invention) to promote or inhibit glucose metabolism and cell survival. Exemplary |
| | | | Pathway | assays for PI3 kinase activity that may be used or routinely modified to test PI3 kinase-induced activity |
| | | | | of polypeptides of the invention (including antibodies and agonists or antagonists of the invention) |
| | | | | include assays disclosed in Forrer et al., Biol Chem 379(8-9): 1101-1110 (1998); Nikoulina et al., |
| | | | | Diabetes 49(2): 263-271 (2000); and Schreyer et al., Diabetes 48(8): 1662-1666 (1999), the contents of |
| | | | | each of which are herein incorporated by reference in its entirety. Rat myoblast cells that may be used |
| | | | | according to these assays are publicly available (e.g., through the ATCC). Exemplary rat myoblast cells |
| | | | | that may be used according to these assays include L6 cells. L6 is an adherent rat myoblast cell line, |
| | | | | isolated from primary cultures of rat thigh muscle, that fuses to form multinucleated myotubes and |
| | | | | striated fibers after culture in differentiation media. |
| 116 | HNGJE50 | 415 | Production of | IL-6 FMAT. IL-6 is produced by T cells and has strong effects on B cells. IL-6 participates in IL-4 |
| | | | IL-6 | induced IgE production and increases IgA production (IgA plays a role in mucosal immunity). IL-6 |
| | | | | induces cytotoxic T cells. Deregulated expression of IL-6 has been linked to autoimmune disease, |
| | | | | plasmacytomas, myelomas, and chronic hyperproliferative diseases. Assays for immunomodulatory and |
| | | | | differentiation factor proteins produced by a large variety of cells where the expression level is strongly |
| | | | | regulated by cytokines, growth factors, and hormones are well known in the art and may be used or |
| | | | | routinely modified to assess the ability of polypeptides of the invention (including antibodies and |
| | | | | agonists or antagonists of the invention) to mediate immunomodulation and differentiation and modulate |
| | | | | T cell proliferation and function. Exemplary assays that test for immunomodulatory proteins evaluate the |
| | | | | production of cytokines, such as IL-6, and the stimulation and upregulation of T cell proliferation and |
| | | | | functional activities. Such assays that may be used or routinely modified to test immunomodulatory and |
| | | | | diffferentiation activity of polypeptides of the invention (including antibodies and agonists or antagonists |
| | | | | of the invention) include assays disclosed in Miraglia et al., J Biomolecular Screening 4: 193-204(1999); |
| | | | | Rowland et al., “Lymphocytes: a practical approach” Chapter 6: 138-160 (2000); and Verhasselt et al., J |
| | | | | Immunol 158: 2919-2925 (1997), the contents of each of which are herein incorporated by reference in its |
| | | | | entirety. Human dendritic cells that may be used according to these assays may be isolated using |
| | | | | techniques disclosed herein or otherwise known in the art. Human dendritic cells are antigen presenting |
| | | | | cells in suspension culture, which, when activated by antigen and/or cytokines, initiate and upregulate T |
| | | | | cell proliferation and functional activities. |
| 116 | HNGJE50 | 415 | Insulin | Assays for measuring secretion of insulin are well-known in the art and may be used or routinely |
| | | | Secretion | modified to assess the ability of polypeptides of the invention (including antibodies and agonists or |
| | | | | antagonists of the invention) to stimulate insulin secretion. For example, insulin secretion is measured by |
| | | | | FMAT using anti-rat insulin antibodies. Insulin secretion from pancreatic beta cells is upregulated by |
| | | | | glucose and also by certain proteins/peptides, and disregulation is a key component in diabetes. |
| | | | | Exemplary assays that may be used or routinely modified to test for stimulation of insulin secretion (from |
| | | | | pancreatic cells) by polypeptides of the invention (including antibodies and agonists or antagonists of the |
| | | | | invention) include assays disclosed in: Shimizu, H., et al., Endocr J, 47(3): 261-9 (2000); Salapatek, A. M., |
| | | | | et al., Mol Endocrinol, 13(8): 1305-17 (1999); Filipsson, K., et al., Ann N Y Acad Sci, 865: 441-4 |
| | | | | (1998); Olson, L. K., et al., J Biol Chem, 271(28): 16544-52 (1996); and, Miraglia S et. al., Journal of |
| | | | | Biomolecular Screening, 4: 193-204 (1999), the contents of each of which is herein incorporated by |
| | | | | reference in its entirety. Pancreatic cells that may be used according to these assays are publicly |
| | | | | available (e.g., through the ATCC) and/or may be routinely generated. Exemplary pancreatic cells that |
| | | | | may be used according to these assays include HITT15 Cells. HITT15 are an adherent epithelial cell line |
| | | | | established from Syrian hamster islet cells transformed with SV40. These cells express glucagon, |
| | | | | somatostatin, and glucocorticoid receptors. The cells secrete insulin, which is stimulated by glucose and |
| | | | | glucagon and suppressed by somatostatin or glucocorticoids. ATTC# CRL-1777 Refs: Lord and |
| | | | | Ashcroft. Biochem. J. 219: 547-551; Santerre et al. Proc. Natl. Acad. Sci. USA 78: 4339-4343, 1981. |
| 117 | HNGND37 | 416 | Regulation of | Assays for the regulation of transcription through the PEPCK promoter are well-Known in the art and |
| | | | transcription | may be used or routinely modified to assess the ability of polypeptides of the invention (including |
| | | | through the | antibodies and agonists or antagonists of the invention) to activate the PEPCK promoter in a reporter |
| | | | PEPCK | construct and regulate liver gluconeogenesis. Exemplary assays for regulation of transcription through |
| | | | promoter in | the PEPCK promoter that may be used or routinely modified to test for PEPCK promoter activity (in |
| | | | hepatocytes | hepatocytes) of polypeptides of the invention (including antibodies and agonists or antagonists of the |
| | | | | invention) include assays disclosed in Berger et al., Gene 66: 1-10 (1998); Cullen and Malm, Methods in |
| | | | | Enzymol 216: 362-368 (1992); Henthorn et al., Proc Natl Acad Sci USA 85: 6342-6346 (1988); Lochhead |
| | | | | et al., Diabetes 49(6): 896-903 (2000); and Yeagley et al., J Biol Chem 275(23): 17814-17820 (2000), the |
| | | | | contents of each of which is herein incorporated by reference in its entirety. Hepatocyte cells that may be |
| | | | | used according to these assays are publicly available (e.g., through the ATCC) and/or may be routinely |
| | | | | generated. Exemplary liver hepatoma cells that may be used according to these assays include H4lle |
| | | | | cells, which contain a tyrosine amino transferase that is inducible with glucocorticoids, insulin, or cAMP |
| | | | | derivatives. |
| 118 | HNGOI12 | 417 | Stimulation of | Assays for measuring calcium flux are well-known in the art and may be used or routinely modified to |
| | | | Calcium Flux in | assess the ability of polypeptides of the invention (including antibodies and agonists or antagonists of the |
| | | | pancreatic beta | invention) to mobilize calcium. For example, the FLPR assay may be used to measure influx of calcium. |
| | | | cells. | Cells normally have very low concentrations of cytosolic calcium compared to much higher extracellular |
| | | | | calcium. Extracellular factors can cause an influx of calcium, leading to activation of calcium responsive |
| | | | | signaling pathways and alterations in cell functions. Exemplary assays that may be used or routinely |
| | | | | modified to measure calcium flux by polypeptides of the invention (including antibodies and agonists or |
| | | | | antagonists of the invention) include assays disclosed in: Satin LS, et al., Endocrinology, 136(10): 4589-601 |
| | | | | (1995); Mogami H, et al., Endocrinology, 136(7): 2960-6 (1995); Richardson SB, et al., Biochem J, |
| | | | | 288 (Pt 3): 847-51 (1992); and, Meats, JE, et al., Cell Calcium 1989 Nov-Dec; 10(8): 535-41 (1989), the |
| | | | | contents of each of which is herein incorporated by reference in its entirety. Pancreatic cells that may be |
| | | | | used according to these assays are publicly available (e.g., through the ATCC) and/or may be routinely |
| | | | | generated. Exemplary pancreatic cells that may be used according to these assays include HITT15 Cells. |
| | | | | HITT15 are an adherent epithelial cell line established from Syrian hamster islet cells transformed with |
| | | | | SV40. These cells express glucagon, somatostatin, and glucocorticoid receptors. The cells secrete |
| | | | | insulin, which is stimulated by glucose and glucagon and suppressed by somatostatin or glucocorticoids. |
| | | | | ATTC# CRL-1777 Refs: Lord and Ashcroft. Biochem. J. 219: 547-551; Santerre et al. Proc. Natl. |
| | | | | Acad. Sci. USA 78: 4339-4343, 1981. |
| 118 | HNGOI12 | 417 | Production of | Assays for production of IL-10 and activation of T-cells are well known in the art and may be used or |
| | | | IL-10 and | routinely modified to assess the ability of polypeptides of the invention (including antibodies and |
| | | | activation of T- | agonists or antagonists of the invention) to stimulate or inhibit production of IL-10 and/or activation of |
| | | | cells. | T-cells. Exemplary assays that may be used or routinely modified to assess the ability of polypeptides |
| | | | | and antibodies of the invention (including agonists or antagonists of the invention) to modulate IL-10 |
| | | | | production and/or T-cell proliferation include, for example, assays such as disclosed and/or cited in: |
| | | | | Robinson, DS, et al., “Th-2 cytokines in allergic disease” Br Med Bull; 56 (4): 956-968 (2000), and |
| | | | | Cohn, et al., “T-helper type 2 cell-directed therapy for asthma” Pharmacology & Therapeutics; 88: 187-196 |
| | | | | (2000); the contents of each of which are herein incorporated by reference in their entirety. |
| | | | | Exemplary cells that may be used according to these assays include Th2 cells. IL10 secreted from Th2 |
| | | | | cells may be measured as a marker of Th2 cell activation. Th2 cells are a class of T cells that secrete |
| | | | | IL4, IL10, IL13, IL5 and IL6. Factors that induce differentiation and activation of Th2 cells play a |
| | | | | major role in the initiation and pathogenesis of allergy and asthma. Primary T helper 2 cells are |
| | | | | generated via in vitro culture under Th2 polarizing conditions using peripheral blood lymphocytes |
| | | | | isolated from cord blood. |
| 119 | HNHEU93 | 418 | Stimulation of | Assays for measuring secretion of insulin are well-known in the art and may be used or routinely |
| | | | insulin secretion | modified to assess the ability of polypeptides of the invention (including antibodies and agonists or |
| | | | from pancreatic | antagonists of the invention) to stimulate insulin secretion. For example, insulin secretion is measured by |
| | | | beta cells. | FMAT using anti-rat insulin antibodies. Insulin secretion from pancreatic beta cells is upregulated by |
| | | | | glucose and also by certain proteins/peptides, and disregulation is a key component in diabetes. |
| | | | | Exemplary assays that may be used or routinely modified to test for stimulation of insulin secretion (from |
| | | | | pancreatic cells) by polypeptides of the invention (including antibodies and agonists or antagonists of the |
| | | | | invention) include assays disclosed in: Ahren, B., et al., Am J Physiol, 277(4 Pt 2): R959-66 (1999); Li, M., |
| | | | | et al., Endocrinology, 138(9): 3735-40 (1997); Kim, K. H., et al., FEBS Lett, 377(2): 237-9 (1995); |
| | | | | and, Miraglia S et. al., Journal of Biomolecular Screening, 4: 193-204 (1999), the contents of each of |
| | | | | which is herein incorporated by reference in its entirety. Pancreatic cells that may be used according to |
| | | | | these assays are publicly available (e.g., through the ATCC) and/or may be routinely generated. |
| | | | | Exemplary pancreatic cells that may be used according to these assays include rat INS-1 cells. INS-1 |
| | | | | cells are a semi-adherent cell line established from cells isolated from an X-ray induced rat transplantable |
| | | | | insulinoma. These cells retain characteristics typical of native pancreatic beta cells including glucose |
| | | | | inducible insulin secretion. References: Asfari et al. Endocrinology 1992 130: 167. |
| 120 | HNHFM14 | 419 | Stimulation of | Assays for measuring calcium flux are well-known in the art and may be used or routinely modified to |
| | | | Calcium Flux in | assess the ability of polypeptides of the invention (including antibodies and agonists or antagonists of the |
| | | | pancreatic beta cells. | invention) to mobilize calcium. For example, the FLPR assay may be used to measure influx of calcium. |
| | | | | Cells normally have very low concentrations of cytosolic calcium compared to much higher extracellular |
| | | | | calcium. Extracellular factors can cause an influx of calcium, leading to activation of calcium responsive |
| | | | | signaling pathways and alterations in cell functions. Exemplary assays that may be used or routinely |
| | | | | modified to measure calcium flux by polypeptides of the invention (including antibodies and agonists or |
| | | | | antagonists of the invention) include assays disclosed in: Satin LS, et al., Endocrinology, 136(10): 4589-601 |
| | | | | (1995); Mogami H, et al., Endocrinology, 136(7): 2960-6 (1995); Richardson SB, et al., Biochem J, |
| | | | | 288 (Pt 3): 847-51 (1992); and, Meats, JE, et al., Cell Calcium 1989 Nov-Dec; 10(8): 535-41 (1989), the |
| | | | | contents of each of which is herein incorporated by reference in its entirety. Pancreatic cells that may be |
| | | | | used according to these assays are publicly available (e.g., through the ATCC) and/or may be routinely |
| | | | | generated. Exemplary pancreatic cells that may be used according to these assays include HITT15 Cells. |
| | | | | HITT15 are an adherent epithelial cell line established from Syrian hamster islet cells transformed with |
| | | | | SV40. These cells express glucagon, somatostatin, and glucocorticoid receptors. The cells secrete |
| | | | | insulin, which is stimulated by glucose and glucagon and suppressed by somatostatin or glucocorticoids. |
| | | | | ATTC# CRL-1777 Refs: Lord and Ashcroft. Biochem. J. 219: 547-551; Santerre et al. Proc. Natl. |
| | | | | Acad. Sci. USA 78: 4339-4343, 1981. |
| 121 | HNHNB29 | 420 | Regulation of | Assays for the regulation of transcription through the PEPCK promoter are well-known in the art and |
| | | | transcription | may be used or routinely modified to assess the ability of polypeptides of the invention (including |
| | | | through the | antibodies and agonists or antagonists of the invention) to activate the PEPCK promoter in a reporter |
| | | | PEPCK | construct and regulate liver gluconeogenesis. Exemplary assays for regulation of transcription through |
| | | | promoter in | the PEPCK promoter that may be used or routinely modified to test for PEPCK promoter activity (in |
| | | | hepatocytes | hepatocytes) of polypeptides of the invention (including antibodies and agonists or antagonists of the |
| | | | | invention) include assays disclosed in Berger et al., Gene 66: 1-10 (1998); Cullen and Malm, Methods in |
| | | | | Enzymol 216: 362-368 (1992); Henthorn et al., Proc Natl Acad Sci USA 85: 6342-6346 (1988); Lochhead |
| | | | | et al., Diabetes 49(6): 896-903 (2000); and Yeagley et al., J Biol Chem 275(23): 17814-17820 (2000), the |
| | | | | contents of each of which is herein incorporated by reference in its entirety. Hepatocyte cells that may be |
| | | | | used according to these assays are publicly available (e.g., through the ATCC) and/or may be routinely |
| | | | | generated. Exemplary liver hepatoma cells that may be used according to these assays include H4lle |
| | | | | cells, which contain a tyrosine amino transferase that is inducible with glucocorticoids, insulin, or cAMP |
| | | | | derivatives. |
| 122 | HNHOD46 | 421 | Activation of | Kinase assay. Kinase assays, for example an Elk-1 kinase assay, for ERK signal transduction that |
| | | | Adipocyte ERK | regulate cell proliferation or differentiation are well known in the art and may be used or routinely |
| | | | Signaling | modified to assess the ability of polypeptides of the invention (including antibodies and agonists or |
| | | | Pathway | antagonists of the invention) to promote or inhibit cell proliferation, activation, and differentiation. |
| | | | | Exemplary assays for ERK kinase activity that may be used or routinely modified to test ERK kinase- |
| | | | | induced activity of polypeptides of the invention (including antibodies and agonists or antagonists of the |
| | | | | invention) include the assays disclosed in Forrer et al., Biol Chem 379(8-9): 1101-1110 (1998); Le |
| | | | | Marchand-Brustel Y, Exp Clin Endocrinol Diabetes 107(2): 126-132 (1999); Kyriakis JM, Biochem Soc |
| | | | | Symp 64: 29-48 (1999); Chang and Karin, Nature 410(6824): 37-40 (2001); and Cobb MH, Prog Biophys |
| | | | | Mol Biol 71(3-4): 479-500 (1999); the contents of each of which are herein incorporated by reference in |
| | | | | its entirety. Mouse adipocyte cells that may be used according to these assays are publicly available |
| | | | | (e.g., through the ATCC). Exemplary mouse adipocyte cells that may be used according to these assays |
| | | | | include 3T3-L1 cells. 3T3-L1 is an adherent mouse preadipocyte cell line that is a continuous substrain |
| | | | | of 3T3 fibroblast cells developed through clonal isolation and undergo a pre-adipocyte to adipose-like |
| | | | | conversion under appropriate differentiation conditions known in the art. |
| 122 | HNHOD46 | 421 | Regulation of | Assays for the regulation of transcription through the DMEF1 response element are well-known in the art |
| | | | transcription via | and may be used or routinely modified to assess the ability of polypeptides of the invention (including |
| | | | DMEF1 | antibodies and agonists or antagonists of the invention) to activate the DMEF1 response element in a |
| | | | response | reporter construct (such as that containing the GLUT4 promoter) and to regulate insulin production. The |
| | | | element in | DMEF1 response element is present in the GLUT4 promoter and binds to MEF2 transcription factor and |
| | | | adipocytes and | another transcription factor that is required for insulin regulation of Glut4 expression in skeletal muscle. |
| | | | pre-adipocytes | GLUT4 is the primary insulin-responsive glucose transporter in fat and muscle tissue. Exemplary assays |
| | | | | that may be used or routinely modified to test for DMEF1 response element activity (in adipocytes and |
| | | | | pre-adipocytes) by polypeptides of the invention (including antibodies and agonists or antagonists of the |
| | | | | invention) include assays disclosed inThai, M. V., et al., J Biol Chem, 273(23): 14285-92 (1998); Mora, S., |
| | | | | et al., J Biol Chem, 275(21): 16323-8 (2000); Liu, M. L., et al., J Biol Chem, 269(45): 28514-21 (1994); |
| | | | | “Identification of a 30-base pair regulatory element and novel DNA binding protein that regulates the |
| | | | | human GLUT4 promoter in transgenic mice”, J Biol Chem. 2000 Aug 4; 275(31): 23666-73; Berger, et al., |
| | | | | Gene 66: 1-10 (1988); and, Cullen, B., et al., Methods in Enzymol. 216: 362-368 (1992), the contents of |
| | | | | each of which is herein incorporated by reference in its entirety. Adipocytes and pre-adipocytes that may |
| | | | | be used according to these assays are publicly available (e.g., through the ATCC) and/or may be |
| | | | | routinely generated. Exemplary cells that may be used according to these assays include the mouse 3T3- |
| | | | | L1 cell line which is an adherent mouse preadipocyte cell line. Mouse 3T3-L1 cells are a continuous |
| | | | | substrain of 3T3 fibroblasts developed through clonal isolation. These cells undergo a pre-adipocyte to |
| | | | | adipose-like conversion under appropriate differentiation culture conditions. |
| 122 | HNHOD46 | 421 | Activation of | Assays for the activation of transcription through the cAMP response element are well-known in the art |
| | | | transcription | and may be used or routinely modified to assess the ability of polypeptides of the invention (including |
| | | | through cAMP | antibodies and agonists or antagonists of the invention) to increase cAMP, regulate CREB transcription |
| | | | response | factors, and modulate expression of genes involved in a wide variety of cell functions. For example, a |
| | | | element (CRE) | 3T3-L1/CRE reporter assay may be used to identify factors that activate the cAMP signaling pathway. |
| | | | in pre-adipocytes. | CREB plays a major role in adipogenesis, and is involved in differentiation into adipocytes. CRE |
| | | | | contains the binding sequence for the transcription factor CREB (CRE binding protein). Exemplary |
| | | | | assays for transcription through the cAMP response element that may be used or routinely modified to |
| | | | | test cAMP-response element activity of polypeptides of the invention (including antibodies and agonists |
| | | | | or antagonists of the invention) include assays disclosed in Berger et al., Gene 66: 1-10 (1998); Cullen |
| | | | | and Malm, Methods in Enzymol 216: 362-368 (1992); Henthorn et al., Proc Natl Acad Sci USA 85: 6342-6346 |
| | | | | (1988); Reusch et al., Mol Cell Biol 20(3): 1008-1020 (2000); and Klemm et al., J Biol Chem |
| | | | | 273: 917-923 (1998), the contents of each of which are herein incorporated by reference in its entirety. |
| | | | | Pre-adipocytes that may be used according to these assays are publicly available (e.g., through the |
| | | | | ATCC) and/or may be routinely generated. Exemplary mouse adipocyte cells that may be used according |
| | | | | to these assays include 3T3-L1 cells. 3T3-L1 is an adherent mouse preadipocyte cell line that is a |
| | | | | continuous substrain of 3T3 fibroblast cells developed through clonal isolation and undergo a pre- |
| | | | | adipocyte to adipose-like conversion under appropriate differentiation conditions known in the art. |
| 122 | HNHOD46 | 421 | Activation of | Assays for the activation of transcription through the Serum Response Element (SRE) are well-known in |
| | | | transcription | the art and may be used or routinely modified to assess the ability of polypeptides of the invention |
| | | | through serum | (including antibodies and agonists or antagonists of the invention) to regulate the serum response factors |
| | | | response | and modulate the expression of genes involved in growth. Exemplary assays for transcription through |
| | | | element in pre- | the SRE that may be used or routinely modified to test SRE activity of the polypeptides of the invention |
| | | | adipocytes. | (including antibodies and agonists or antagonists of the invention) include assays disclosed in Berger et |
| | | | | al., Gene 66: 1-10 (1998); Cullen and Malm, Methods in Enzymol 216: 362-368 (1992); Henthorn et al., |
| | | | | Proc Natl Acad Sci USA 85: 6342-6346 (1988); and Black et al., Virus Genes 12(2): 105-117 (1997), the |
| | | | | content of each of which are herein incorporated by reference in its entirety. Pre-adipocytes that may be |
| | | | | used according to these assays are publicly available (e.g., through the ATCC) and/or may be routinely |
| | | | | generated. Exemplary mouse adipocyte cells that may be used according to these assays include 3T3-L1 |
| | | | | cells. 3T3-L1 is an adherent mouse preadipocyte cell line that is a continuous substrain of 3T3 fibroblast |
| | | | | cells developed through clonal isolation and undergo a pre-adipocyte to adipose-like conversion under |
| | | | | appropriate differentiation conditions known in the art. |
| 122 | HNHOD46 | 421 | Activation of | Assays for the activation of transcription through the cAMP response element are well-known in the art |
| | | | transcription | and may be used or routinely modified to assess the ability of polypeptides of the invention (including |
| | | | through cAMP | antibodies and agonists or antagonists of the invention) to increase cAMP and regulate CREB |
| | | | response | transcription factors, and modulate expression of genes involved in a wide variety of cell functions. |
| | | | element in | Exemplary assays for transcription through the cAMP response element that may be used or routinely |
| | | | immune cells | modified to test cAMP-response element activity of polypeptides of the invention (including antibodies |
| | | | (such as T- | and agonists or antagonists of the invention) include assays disclosed in Berger et al., Gene 66: 1-10 |
| | | | cells). | (1998); Cullen and Malm, Methods in Enzymol 216: 362-368 (1992); Henthorn et al., Proc Natl Acad Sci |
| | | | | USA 85: 6342-6346 (1998); Black et al., Virus Genes 15(2): 105-117 (1997); and Belkowski et al., J |
| | | | | Immunol 161(2): 659-665 (1998), the contents of each of which are herein incorporated by reference in its |
| | | | | entirety. T cells that may be used according to these assays are publicly available (e.g., through the |
| | | | | ATCC). Exemplary mouse T cells that may be used according to these assays include the CTLL cell |
| | | | | line, which is a suspension culture of IL-2 dependent cytotoxic T cells. |
| 122 | HNHOD46 | 421 | Activation of | Assays for the activation of transcription through the Serum Response Element (SRE) are well-known in |
| | | | transcription | the art and may be used or routinely modified to assess the ability of polypeptides of the invention |
| | | | through serum | (including antibodies and agonists or antagonists of the invention) to regulate the serum response factors |
| | | | response | and modulate the expression of genes involved in growth. Exemplary assays for transcription through |
| | | | element in | the SRE that may be used or routinely modified to test SRE activity of the polypeptides of the invention |
| | | | immune cells | (including antibodies and agonists or antagonists of the invention) include assays disclosed in Berger et |
| | | | (such as T- | al., Gene 66: 1-10 (1998); Cullen and Malm, Methods in Enzymol 216: 362-368 (1992); Henthorn et al., |
| | | | cells). | Proc Natl Acad Sci USA 85: 6342-6346 (1988); and Black et al., Virus Genes 12(2): 105-117 (1997), the |
| | | | | content of each of which are herein incorporated by reference in its entirety. T cells that may be used |
| | | | | according to these assays are publicly available (e.g., through the ATCC). Exemplary mouse T cells that |
| | | | | may be used according to these assays include the CTLL cell line, which is an IL-2 dependent suspension culture of T |
| | | | | cells with cytotoxic activity. |
| 122 | HNHOD46 | 421 | Production of | MIP-1alpha FMAT. Assays for immunomodulatory proteins produced by activated dendritic cells that |
| | | | MIP1alpha | upregulate monocyte/macrophage and T cell chemotaxis are well known in the art and may be used or |
| | | | | routinely modified to assess the ability of polypeptides of the invention (including antibodies and |
| | | | | agonists or antagonists of the invention) to mediate immunomodulation, modulate chemotaxis, and |
| | | | | modulate T cell differentiation. Exemplary assays that test for immunomodulatory proteins evaluate the |
| | | | | production of chemokines, such as macrophage inflammatory protein 1 alpha (MIP-1a), and the |
| | | | | activation of monocytes/macrophages and T cells. Such assays that may be used or routinely modified to |
| | | | | test immunomodulatory and chemotaxis activity of polypeptides of the invention (including antibodies |
| | | | | and agonists or antagonists of the invention) include assays disclosed in Miraglia et al., J Biomolecular |
| | | | | Screening 4: 193-204(1999); Rowland et al., “Lymphocytes: a practical approach” Chapter 6: 138-160 |
| | | | | (2000); Satthaporn and Eremin, J R Coll Surg Ednb 45(1): 9-19 (2001); Drakes et al., Transp Immunol |
| | | | | 8(1): 17-29 (2000); Verhasselt et al., J Immunol 158: 2919-2925 (1997); and Nardelli et al., J Leukoc Biol |
| | | | | 65: 822-828 (1999), the contents of each of which are herein incorporated by reference in its entirety. |
| | | | | Human dendritic cells that may be used according to these assays may be isolated using techniques |
| | | | | disclosed herein or otherwise known in the art. Human dendritic cells are antigen presenting cells in |
| | | | | suspension culture, which, when activated by antigen and/or cytokines, initiate and upregulate T cell |
| | | | | proliferation and functional activities. |
| 122 | HNHOD46 | 421 | Production of | IL-6 FMAT. IL-6 is produced by T cells and has strong effects on B cells. IL-6 participates in IL-4 |
| | | | IL-6 | induced IgE production and increases IgA production (IgA plays a role in mucosal immunity). IL-6 |
| | | | | induces cytotoxic T cells. Deregulated expression of IL-6 has been linked to autoimmune disease, |
| | | | | plasmacytomas, myelomas, and chronic hyperproliferative diseases. Assays for immunomodulatory and |
| | | | | differentiation factor proteins produced by a large variety of cells where the expression level is strongly |
| | | | | regulated by cytokines, growth factors, and hormones are well known in the art and may be used or |
| | | | | routinely modified to assess the ability of polypeptides of the invention (including antibodies and |
| | | | | agonists or antagonists of the invention) to mediate immunomodulation and differentiation and modulate |
| | | | | T cell proliferation and function. Exemplary assays that test for immunomodulatory proteins evaluate the |
| | | | | production of cytokines, such as IL-6, and the stimulation and upregulation of T cell proliferation and |
| | | | | functional activities. Such assays that may be used or routinely modified to test immunomodulatory and |
| | | | | diffferentiation activity of polypeptides of the invention (including antibodies and agonists or antagonists |
| | | | | of the invention) include assays disclosed in Miraglia et al., J Biomolecular Screening 4: 193-204(1999); |
| | | | | Rowland et al., “Lymphocytes: a practical approach” Chapter 6: 138-160 (2000); and Verhasselt et al., J |
| | | | | Immunol 158: 2919-2925 (1997), the contents of each of which are herein incorporated by reference in its |
| | | | | entirety. Human dendritic cells that may be used according to these assays may be isolated using |
| | | | | techniques disclosed herein or otherwise known in the art. Human dendritic cells are antigen presenting |
| | | | | cells in suspension culture, which, when activated by antigen and/or cytokines, initiate and upregulate T |
| | | | | cell proliferation and functional activities. |
| 122 | HNHOD46 | 421 | Activation of | This reporter assay measures activation of the GATA-3 signaling pathway in HMC-1 human mast cell |
| | | | transcription | line. Activation of GATA-3 in mast cells has been linked to cytokine and chemokine production. Assays |
| | | | through GATA- | for the activation of transcription through the GATA3 response element are well-known in the art and |
| | | | 3 response | may be used or routinely modified to assess the ability of polypeptides of the invention (including |
| | | | element in | antibodies and agonists or antagonists of the invention) to regulate GATA3 transcription factors and |
| | | | immune cells | modulate expression of mast cell genes important for immune response development. Exemplary assays |
| | | | (such as mast | for transcription through the GATA3 response element that may be used or routinely modified to test |
| | | | cells). | GATA3-response element activity of polypeptides of the invention (including antibodies and agonists or |
| | | | | antagonists of the invention) include assays disclosed in Berger et al., Gene 66: 1-10 (1998); Cullen and |
| | | | | Malm, Methods in Enzymol 216: 362-368 (1992); Henthorn et al., Proc Natl Acad Sci USA 85: 6342-6346 |
| | | | | (1988); Flavell et al., Cold Spring Harb Symp Quant Biol 64: 563-571 (1999); Rodriguez-Palmero et al., |
| | | | | Eur J Immunol 29(12): 3914-3924 (1999); Zheng and Flavell, Cell 89(4): 587-596 (1997); and Henderson |
| | | | | et al., Mol Cell Biol 14(6): 4286-4294 (1994), the contents of each of which are herein incorporated by |
| | | | | reference in its entirety. Mast cells that may be used according to these assays are publicly available |
| | | | | (e.g., through the ATCC). Exemplary human mast cells that may be used according to these assays |
| | | | | include the HMC-1 cell line, which is an immature human mast cell line established from the peripheral |
| | | | | blood of a patient with mast cell leukemia, and exhibits many characteristics of immature mast cells. |
| 122 | HNHOD46 | 421 | Activation of | This reporter assay measures activation of the NFAT signaling pathway in HMC-1 human mast cell line. |
| | | | transcription | Activation of NFAT in mast cells has been linked to cytokine and chemokine production. Assays for the |
| | | | through NFAT | activation of transcription through the Nuclear Factor of Activated T cells (NFAT) response element are |
| | | | response | well-known in the art and may be used or routinely modified to assess the ability of polypeptides of the |
| | | | element in | invention (including antibodies and agonists or antagonists of the invention) to regulate NFAT |
| | | | immune cells | transcription factors and modulate expression of genes involved in immunomodulatory functions. |
| | | | (such as mast cells). | Exemplary assays for transcription through the NFAT response element that may be used or routinely |
| | | | | modified to test NFAT-response element activity of polypeptides of the invention (including antibodies |
| | | | | and agonists or antagonists of the invention) include assays disclosed in Berger et al., Gene 66: 1-10 |
| | | | | (1998); Cullen and Malm, Methods in Enzymol 216: 362-368 (1992); Henthorn et al., Proc Natl Acad Sci |
| | | | | USA 85: 6342-6346 (1988); De Boer et al., Int J Biochem Cell Biol 31(10): 1221-1236 (1999); Ali et al., J |
| | | | | Immunol 165(12): 7215-7223 (2000); Hutchinson and McCloskey, J Biol Chem 270(27): 16333-16338 |
| | | | | (1995), and Turner et al., J Exp Med 188: 527-537 (1998), the contents of each of which are herein |
| | | | | incorporated by reference in its entirety. Mast cells that may be used according to these assays are |
| | | | | publicly available (e.g., through the ATCC). Exemplary human mast cells that may be used according to |
| | | | | these assays include the HMC-1 cell line, which is an immature human mast cell line established from |
| | | | | the peripheral blood of a patient with mast cell leukemia, and exhibits many characteristics of immature mast cells. |
| 122 | HNHOD46 | 421 | Activation of | Assays for the activation of transcription through the cAMP response element are well-known in the art |
| | | | transcription | and may be used or routinely modified to assess the ability of polypeptides of the invention (including |
| | | | through cAMP | antibodies and agonists or antagonists of the invention) to increase cAMP, bind to CREB transcription |
| | | | response | factor, and modulate expression of genes involved in a wide variety of cell functions. Exemplary assays |
| | | | element in | for transcription through the cAMP response element that may be used or routinely modified to test |
| | | | immune cells | cAMP-response element activity of polypeptides of the invention (including antibodies and agonists or |
| | | | (such as T- | antagonists of the invention) include assays disclosed in Berger et al., Gene 66: 1-10 (1998); Cullen and |
| | | | cells). | Malm, Methods in Enzymol 216: 362-368 (1992); Henthorn et al., Proc Natl Acad Sci USA 85: 6342-6346 |
| | | | | (1988); Black et al., Virus Genes 15(2): 105-117 (1997); and Belkowski et al., J Immunol 161(2): 659-665 |
| | | | | (1998), the contents of each of which are herein incorporated by reference in its entirety. T cells that may |
| | | | | be used according to these assays are publicly available (e.g., through the ATCC). Exemplary human T |
| | | | | cells that may be used according to these assays include the JURKAT cell line, which is a suspension |
| | | | | culture of leukemia cells that produce IL-2 when stimulated. |
| 122 | HNHOD46 | 421 | Activation of | Assays for the activation of transcription through the Nuclear Factor of Activated T cells (NFAT) |
| | | | transcription | response element are well-known in the art and may be used or routinely modified to assess the ability of |
| | | | through NFAT | polypeptides of the invention (including antibodies and agonists or antagonists of the invention) to |
| | | | response in | regulate NFAT transcription factors and modulate expression of genes involved in immunomodulatory |
| | | | immune cells | functions. Exemplary assays for transcription through the NFAT response element that may be used or |
| | | | (such as T- | routinely modified to test NFAT-response element activity of polypeptides of the invention (including |
| | | | cells). | antibodies and agonists or antagonists of the invention) include assays disclosed in Berger et al., Gene |
| | | | | 66: 1-10 (1998); Cullen and Malm, Methods in Enzymol 216: 362-368 (1992); Henthorn et al., Proc Natl |
| | | | | Acad Sci USA 85: 6342-6346 (1988); Serfling et al., Biochim Biophys Acta 1498(1): 1-18 (2000); De |
| | | | | Boer et al., Int J Biochem Cell Biol 31(10): 1221-1236 (1999); Fraser et al., Eur J Immunol 29(3): 838-844 |
| | | | | (1999); and Yeseen et al., J Biol Chem 268(19): 14285-14293 (1993), the contents of each of which are |
| | | | | herein incorporated by reference in its entirety. T cells that may be used according to these assays are |
| | | | | publicly available (e.g., through the ATCC). Exemplary human T cells that may be used according to |
| | | | | these assays include the JURKAT cell line, which is a suspension culture of leukemia cells that produce |
| | | | | IL-2 when stimulated. |
| 122 | HNHOD46 | 421 | Activation of | This reporter assay measures activation of the NFkB signaling pathway in Ku812 human basophil cell |
| | | | transcription | line. Assays for the activation of transcription through the NFKB response element are ell-known in the |
| | | | through NFKB | art and may be used or routinely modified to assess the ability of polypeptides of the invention (including |
| | | | response | antibodies and agonists or antagonists of the invention) to regulate NFKB transcription factors and |
| | | | element in | modulate expression of immunomodulatory genes. Exemplary assays for transcription through the |
| | | | immune cells | NFKB response element that may be used or rountinely modified to test NFKB-response element activity |
| | | | (such as | of polypeptides of the invention (including antibodies and agonists or antagonists of the invention) |
| | | | basophils). | include assays disclosed in Berger et al., Gene 66: 1-10 (1998); Cullen and Malm, Methods in Enzymol |
| | | | | 216: 362-368 (1992); Henthorn et al., Proc Natl Acad Sci USA 85: 6342-6346 (1988); Marone et al, Int |
| | | | | Arch Allergy Immunol 114(3): 207-17 (1997), the contents of each of which are herein incorporated by |
| | | | | reference in its entirety. Basophils that may be used according to these assays are publicly available |
| | | | | (e.g., through the ATCC). Exemplary human basophil cell lines that may be used according to these |
| | | | | assays include Ku812, originally established from a patient with chronic myelogenous leukemia. It is an |
| | | | | immature prebasophilic cell line that can be induced to differentiate into mature basophils. |
| 122 | HNHOD46 | 421 | Activation of | Assays for the activation of transcription through the Gamma Interferon Activation Site (GAS) response |
| | | | transcription | element are well-known in the art and may be used or routinely modified to assess the ability of |
| | | | through GAS | polypeptides of the invention (including antibodies and agonists or antagonists of the invention) to |
| | | | response | regulate STAT transcription factors and modulate gene expression involved in a wide variety of cell |
| | | | element in | functions. Exemplary assays for transcription through the GAS response element that may be used or |
| | | | immune cells | routinely modified to test GAS-response element activity of polypeptides of the invention (including |
| | | | (such as T- | antibodies and agonists or antagonists of the invention) include assays disclosed in Berger et al., Gene |
| | | | cells). | 66: 1-10 (1998); Cullen and Malm, Methods in Enzymol 216: 362-368 (1992); Henthorn et al., Proc Natl |
| | | | | Acad Sci USA 85: 6342-6346 (1988); Matikainen et al., Blood 93(6): 1980-1991 (1999); and Henttinen et |
| | | | | al., J Immunol 155(10): 4582-4587 (1995), the contents of each of which are herein incorporated by |
| | | | | reference in its entirety. Exemplary human T cells, such as the MOLT4 cell line, that may be used |
| | | | | according to these assays are publicly available (e.g., through the ATCC). |
| 122 | HNHOD46 | 421 | Activation of | Assays for the activation of transcription through the NFKB response element are well-known in the art |
| | | | transcription | and may be used or routinely modified to assess the ability of polypeptides of the invention (including |
| | | | through NFKB | antibodies and agonists or antagonists of the invention) to regulate NFKB transcription factors and |
| | | | response | modulate expression of immunomodulatory genes. Exemplary assays for transcription through the |
| | | | element in | NFKB response element that may be used or rountinely modified to test NFKB-response element activity |
| | | | immune cells | of polypeptides of the invention (including antibodies and agonists or antagonists of the invention) |
| | | | (such as T- | include assays disclosed in Berger et al., Gene 66: 1-10 (1998); Cullen and Malm, Methods in Enzymol |
| | | | cells). | 216: 362-368 (1992); Henthorn et al., Proc Natl Acad Sci USA 85: 6342-6346 (1988); Black et al., Virus |
| | | | | Gnes 15(2): 105-117 (1997); and Fraser et al., 29(3): 838-844 (1999), the contents of each of which are |
| | | | | herein incorporated by reference in its entirety. Exemplary human T cells, such as the MOLT4, that may |
| | | | | be used according to these assays are publicly available (e.g., through the ATCC). |
| 122 | HNHOD46 | 421 | Activation of | Assays for the activation of transcription through the NFKB response element are well-known in the art |
| | | | transcription | and may be used or routinely modified to assess the ability of polypeptides of the invention (including |
| | | | through NFKB | antibodies and agonists or antagonists of the invention) to regulate NFKB transcription factors and |
| | | | response | modulate expression of immunomodulatory genes. Exemplary assays for transcription through the |
| | | | element in | NFKB response element that may be used or rountinely modified to test NFKB-response element activity |
| | | | immune cells | of polypeptides of the invention (including antibodies and agonists or antagonists of the invention) |
| | | | (such as natural | include assays disclosed in Berger et al., Gene 66: 1-10 (1998); Cullen and Malm, Methods in Enzymol |
| | | | killer cells). | 216: 362-368 (1992); Henthorn et al., Proc Natl Acad Sci USA 85: 6342-6346 (1988); Valle Blazquez et |
| | | | | al, Immunology 90(3): 455-460 (1997); Aramburau et al., J Exp Med 82(3): 801-810 (1995); and Fraser et |
| | | | | al., 29(3): 838-844 (1999), the contents of each of which are herein incorporated by reference in its |
| | | | | entirety. NK cells that may be used according to these assays are publicly available (e.g., through the |
| | | | | ATCC). Exemplary NK cells that may be used according to these assays include the NK-YT cell line, |
| | | | | which is a human natural killer cell line with cytolytic and cytotoxic activity. |
| 122 | HNHOD46 | 421 | Activation of | Assays for the activation of transcription through the AP1 response element are well-known in the art and |
| | | | transcription | may be used or routinely modified to assess the ability of polypeptides of the invention (including |
| | | | through AP1 | antibodies and agonists or antagonists of the invention) to modulate growth and other cell functions. |
| | | | response | Exemplary assays for transcription through the AP1 response element that may be used or routinely |
| | | | element in | modified to test AP1-response element activity of polypeptides of the invention (including antibodies and |
| | | | immune cells | agonists or antagonists of the invention) include assays disclosed in Berger et al., Gene 66: 1-10 (1988); |
| | | | (such as T- | Cullen and Malm, Methods in Enzymol 216: 362-368 (1992); Henthorn et al., Proc Natl Acad Sci USA |
| | | | cells). | 85: 6342-6346 (1988); Rellahan et al., J Biol Chem 272(49): 30806-30811 (1997); Chang et al., Mol Cell |
| | | | | Biol 18(9): 4986-4993 (1998); and Fraser et al., Eur J Immunol 29(3): 838-844 (1999), the contents of |
| | | | | each of which are herein incorporated by reference in its entirety. Human T cells that may be used |
| | | | | according to these assays are publicly available (e.g., through the ATCC). Exemplary human T cells that |
| | | | | may be used according to these assays include the SUPT cell line, which is an IL-2 and IL-4 responsive |
| | | | | suspension-culture cell line. |
| 122 | HNHOD46 | 421 | Activation of | Assays for the activation of transcription through the CD28 response element are well-known in the art |
| | | | transcription | and may be used or routinely modified to assess the ability of polypeptides of the invention (including |
| | | | through CD28 | antibodies and agonists or antagonists of the invention) to stimulate IL-2 expression in T cells. |
| | | | response | Exemplary assays for transcription through the CD28 response element that may be used or routinely |
| | | | element in | modified to test CD28-response element activity of polypeptides of the invention (including antibodies |
| | | | immune cells | and agonists or antagonists of the invention) include assays disclosed in Berger et al., Gene 66: 1-10 |
| | | | (such as T- | (1998); Cullen and Malm, Methods in Enzymol 216: 362-368 (1992); Henthorn et al., Proc Natl Acad Sci |
| | | | cells). | USA 85: 6342-6346 (1988); McGuire and Iacobelli, J Immunol 159(3): 1319-1327 (1997); Parra et al., J |
| | | | | Immunol 166(4): 2437-2443 (2001); and Butscher et al., J Biol Chem 3(1): 552-560 (1998), the contents |
| | | | | of each of which are herein incorporated by reference in its entirety. T cells that may be used according |
| | | | | to these assays are publicly available (e.g., through the ATCC). Exemplary human T cells that may be |
| | | | | used according to these assays include the SUPT cell line, which is a suspension culture of IL-2 and IL-4 |
| | | | | responsive T cells. |
| 122 | HNHOD46 | 421 | Activation of | Assays for the activation of transcription through the Gamma Interferon Activation Site (GAS) response |
| | | | transcription | element are well-known in the art and may be used or routinely modified to assess the ability of |
| | | | through GAS | polypeptides of the invention (including antibodies and agonists or antagonists of the invention) to |
| | | | response | regulate STAT transcription factors and modulate gene expression involved in a wide variety of cell |
| | | | element in | functions. Exemplary assays for transcription through the GAS response element that may be used or |
| | | | immune cells | routinely modified to test GAS-response element activity of polypeptides of the invention (including |
| | | | (such as T- | antibodies and agonists or antagonists of the invention) include assays disclosed in Berger et al., Gene |
| | | | cells). | 66: 1-10 (1998); Cullen and Malm, Methods in Enzymol 216: 362-368 (1992); Henttinen et al., Proc Natl |
| | | | | Acad Sci USA 85: 6342-6346 (1988); Matikainen et al., Blood 93(6): 1980-1991 (1999); and Henttinen et |
| | | | | al., J Immunol 155(10): 4582-4587 (1995), the contents of each of which are herein incorporated by |
| | | | | reference in its entirety. Exemplary human T cells, such as the SUPT cell line, that may be used |
| | | | | according to these assays are publicly available (e.g., through the ATCC). |
| 122 | HNHOD46 | 421 | Activation of | Assays for the activation of transcription through the Nuclear Factor of Activated T cells (NFAT) |
| | | | transcription | response element are well-known in the art and may be used or routinely modified to assess the ability of |
| | | | through NFAT | polypeptides of the invention (including antibodies and agonists or antagonists of the invention) to |
| | | | response | regulate NFAT transcription factors and modulate expression of genes involved in immunomodulatory |
| | | | element in | functions. Exemplary assays for transcription through the NFAT response element that may be used or |
| | | | immune cells | routinely modified to test NFAT-response element activity of polypeptides of the invention (including |
| | | | (such as T- | antibodies and agonists or antagonists of the invention) include assays disclosed in Berger et al., Gene |
| | | | cells). | 66: 1-10 (1998); Cullen and Malm, Methods in Enzymol 216: 362-368 (1992); Henthorn et al., Proc Natl |
| | | | | Acad Sci USA 85: 6342-6346 (1988); Serfling et al., Biochim Biophys Acta 1498(1): 1-18 (2000); De |
| | | | | Boer et al., Int J Biochem Cell Biol 31(10): 1221-1236 (1999); Fraser et al., Eur J Immunol 29(3): 838-844 |
| | | | | (1999); and Yeseen et al., J Biol Chem 268(19): 14285-14293 (1993), the contents of each of which are |
| | | | | herein incorporated by reference in its entirety. T cells that may be used according to these assays are |
| | | | | publicly available (e.g., through the ATCC). Exemplary human T cells that may be used according to |
| | | | | these assays include the SUPT cell line, which is a suspension culture of IL-2 and IL-4 responsive T |
| | | | | cells. |
| 122 | HNHOD46 | 421 | Activation of | Assays for the activation of transcription through the Signal Transducers and Activators of Transcription |
| | | | transcription | (STAT6) response element are well-known in the art and may be used or routinely modified to assess the |
| | | | through STAT6 | ability of polypeptides of the invention (including antibodies and agonists or antagonists of the invention) |
| | | | response | to regulate STAT6 transcription factors and modulate the expression of multiple genes. Exemplary |
| | | | element in | assays for transcription through the STAT6 response element that may be used or routinely modified to |
| | | | immune cells | test STAT6 response element activity of the polypeptides of the invention (including antibodies and |
| | | | (such as T- | agonists or antagonists of the invention) include assays disclosed in Berger et al., Gene 66: 1-10 (1998); |
| | | | cells). | Cullen and Malm, Methods in Enzymol 216: 362-368 (1992); Henthorn et al., Proc Natl Acad Sci USA |
| | | | | 85: 6342-6346 (1988); Georas et al., Blood 92(12): 4529-4538 (1998); Moffatt et al., Transplantation |
| | | | | 69(7): 1521-1523 (2000); Curiel et al., Eur J Immunol 27(8): 1982-1987 (1997); and Masuda et al., J Biol |
| | | | | Chem 275(38): 29331-29337 (2000), the contents of each of which are herein incorporated by reference in |
| | | | | its entirety. T cells that may be used according to these assays are publicly available (e.g., through the |
| | | | | ATCC). Exemplary T cells that may be used according to these assays include the SUPT cell line, which |
| | | | | is a suspension culture of IL-2 and IL-4 responsive T cells. |
| 122 | HNHOD46 | 421 | Activation of | Assays for the activation of transcription through the NFKB response element are well-known in the art |
| | | | transcription | and may be used or routinely modified to assess the ability of polypeptides of the invention (including |
| | | | through NFKB | antibodies and agonists or antagonists of the invention) to regulate NFKB transcription factors and |
| | | | response | modulate expression of immunomodulatory genes. Exemplary assays for transcription through the |
| | | | element in | NFKB response element that may be used or rountinely modified to test NFKB-response element activity |
| | | | immune cells | of polypeptides of the invention (including antibodies and agonists or antagonists of the invention) |
| | | | (such as T- | include assays disclosed in Berger et al., Gene 66: 1-10 (1998); Cullen and Malm, Methods in Enzymol |
| | | | cells). | 216: 362-368 (1992); Henthorn et al., Proc Natl Acad Sci USA 85: 6342-6346 (1988); Black et al., Virus |
| | | | | Gnes 15(2): 105-117 (1997); and Fraser et al., 29(3): 838-844 (1999), the contents of each of which are |
| | | | | herein incorporated by reference in its entirety. T cells that may be used according to these assays are |
| | | | | publicly available (e.g., through the ATCC). Exemplary human T cells that may be used according to |
| | | | | these assays include the SUPT cell line, which is a suspension culture of IL-2 and IL-4 responsive T |
| | | | | cells. |
| 122 | HNHOD46 | 421 | Activation of | Assays for the activation of transcription through the Serum Response Element (SRE) are well-known in |
| | | | transcription | the art and may be used or routinely modified to assess the ability of polypeptides of the invention |
| | | | through serum | (including antibodies and agonists or antagonists of the invention) to regulate serum response factors and |
| | | | response | modulate the expression of genes involved in growth and upregulate the function of growth-related genes |
| | | | element in | in many cell types. Exemplary assays for transcription through the SRE that may be used or routinely |
| | | | immune cells | modified to test SRE activity of the polypeptides of the invention (including antibodies and agonists or |
| | | | (such as natural | antagonists of the invention) include assays disclosed in Berger et al., Gene 66: 1-10 (1998); Cullen and |
| | | | killer cells): | Malm, Methods in Enzymol 216: 362-368 (1992); Henthorn et al., Proc Natl Acad Sci USA 85: 6342-6346 |
| | | | | (1988); Benson et al., J Immunol 153(9): 3862-3873 (1994); and Black et al., Virus Genes 12(2): 105-117 |
| | | | | (1997), the content of each of which are herein incorporated by reference in its entirety. T cells that may |
| | | | | be used according to these assays are publicly available (e.g., through the ATCC). Exemplary T cells |
| | | | | that may be used according to these assays include the NK-YT cell line, which is a human natural killer |
| | | | | cell line with cytolytic and cytotoxic activity. |
| 123 | HNTBI26 | 422 | Regulation of | Caspase Apoptosis. Assays for caspase apoptosis are well known in the art and may be used or |
| | | | apoptosis in | routinely modified to assess the ability of polypeptides of the invention (including antibodies and |
| | | | pancreatic beta | agonists or antagonists of the invention) to promote caspase protease-mediated apoptosis. Apoptosis in |
| | | | cells. | pancreatic beta is associated with induction and progression of diabetes. Exemplary assays for caspase |
| | | | | apoptosis that may be used or routinely modified to test capase apoptosis activity of polypeptides of the |
| | | | | invention (including antibodies and agonists or antagonists of the invention) include the assays disclosed |
| | | | | in: Loweth, AC, et al., FEBS Lett, 400(3): 285-8 (1997); Saini, KS, et al., Biochem Mol Biol Int, |
| | | | | 39(6): 1229-36 (1996); Krautheim, A., et al., Br J Pharmacol, 129(4): 687-94 (2000); Chandra J, et al., |
| | | | | Diabetes, 50 Suppl 1: S44-7 (2001); Suk K, et al., J Immunol, 166(7): 4481-9 (2001); Tejedo J, et al., |
| | | | | FEBS Lett, 459(2): 238-43 (1999); Zhang, S., et al., FEBS Lett, 455(3): 315-20 (1999); Lee et al., FEBS |
| | | | | Lett 485(2-3): 122-126 (2000); Nor et al., J Vasc Res 37(3): 209-218 (2000); and Karsan and Harlan, J |
| | | | | Atheroscler Thromb 3(2): 75-80 (1996); the contents of each of which are herein incorporated by |
| | | | | reference in its entirety. Pancreatic cells that may be used according to these assays are publicly |
| | | | | available (e.g., through the ATCC) and/or may be routinely generated. Exemplary pancreatic cells that |
| | | | | may be used according to these assays include RIN-m. RIN-m is a rat adherent pancreatic beta cell |
| | | | | insulinoma cell line derived from a radiation induced transplantable rat islet cell tumor. The cells |
| | | | | produce and secrete islet polypeptide hormones, and produce insulin, somatostatin, and possibly |
| | | | | glucagon. ATTC: #CRL-2057 Chick et al. Proc. Natl. Acad. Sci. 1977 74: 628; AF et al. Proc. Natl. |
| | | | | Acad. Sci. 1980 77: 3519. |
| 124 | HNTBL27 | 423 | Regulation of | Caspase Apoptosis. Assays for caspase apoptosis are well known in the art and may be used or |
| | | | apoptosis in | routinely modified to assess the ability of polypeptides of the invention (including antibodies and |
| | | | pancreatic beta | agonists or antagonists of the invention) to promote caspase protease-mediated apoptosis. Apoptosis in |
| | | | cells. | pancreatic beta is associated with induction and progression of diabetes. Exemplary assays for caspase |
| | | | | apoptosis that may be used or routinely modified to test capase apoptosis activity of polypeptides of the |
| | | | | invention (including antibodies and agonists or antagonists of the invention) include the assays disclosed |
| | | | | in: Loweth, AC, et al., FEBS Lett, 400(3): 285-8 (1997); Saini, KS, et al., Biochem Mol Biol Int, |
| | | | | 39(6): 1229-36 (1996); Krautheim, A., et al., Br J Pharmacol, 129(4): 687-94 (2000); Chandra J, et al., |
| | | | | Diabetes, 50 Suppl 1: S44-7 (2001); Suk K, et al., J Immunol, 166(7): 4481-9 (2001); Tejedo J, et al., |
| | | | | FEBS Lett, 459(2): 238-43 (1999); Zhang, S., et al., FEBS Lett, 455(3): 315-20 (1999); Lee et al., FEBS |
| | | | | Lett 485(2-3): 122-126 (2000); Nor et al., J Vasc Res 37(3): 209-218 (2000); and Karsan and Harlan, J |
| | | | | Atheroscler Thromb 3(2): 75-80 (1996); the contents of each of which are herein incorporated by |
| | | | | reference in its entirety. Pancreatic cells that may be used according to these assays are publicly |
| | | | | available (e.g., through the ATCC) and/or may be routinely generated. Exemplary pancreatic cells that |
| | | | | may be used according to these assays include RIN-m. RIN-m is a rat adherent pancreatic beta cell |
| | | | | insulinoma cell line derived from a radiation induced transplantable rat islet cell tumor. The cells |
| | | | | produce and secrete islet polypeptide hormones, and produce insulin, somatostatin, and possibly |
| | | | | glucagon. ATTC: #CRL-2057 Chick et al. Proc. Natl. Acad. Sci. 1977 74: 628; AF et al. Proc. Natl. |
| | | | | Acad. Sci. 1980 77: 3519. |
| 124 | HNTBL27 | 423 | Production of | Assays for production of IL-10 and activation of T-cells are well known in the art and may be used or |
| | | | IL-10 and | routinely modified to assess the ability of polypeptides of the invention (including antibodies and |
| | | | activation of T- | agonists or antagonists of the invention) to stimulate or inhibit production of IL-10 and/or activation of |
| | | | cells. | T-cells. Exemplary assays that may be used or routinely modified to assess the ability of polypeptides |
| | | | | and antibodies of the invention (including agonists or antagonists of the invention) to modulate IL-10 |
| | | | | production and/or T-cell proliferation include, for example, assays such as disclosed and/or cited in: |
| | | | | Robinson, DS, et al., “Th-2 cytokines in allergic disease” Br Med Bull; 56 (4): 956-968 (2000), and |
| | | | | Cohn, et al., “T-helper type 2 cell-directed therapy for asthma” Pharmacology & Therapeutics; 88: 187-196 |
| | | | | (2000); the contents of each of which are herein incorporated by reference in their entirety. |
| | | | | Exemplary cells that may be used according to these assays include Th2 cells. IL10 secreted from Th2 |
| | | | | cells may be measured as a marker of Th2 cell activation. Th2 cells are a class of T cells that secrete |
| | | | | IL4, IL10, IL13, IL5 and IL6. Factors that induce differentiation and activation of Th2 cells play a |
| | | | | major role in the initiation and pathogenesis of allergy and asthma. Primary T helper 2 cells are |
| | | | | generated via in vitro culture under Th2 polarizing conditions using peripheral blood lymphocytes |
| | | | | isolated from cord blood. |
| 125 | HNTCE26 | 424 | Production of | TNFa FMAT. Assays for immunomodulatory proteins produced by activated macrophages, T cells, |
| | | | TNF alpha by | fibroblasts, smooth muscle, and other cell types that exert a wide variety of inflammatory and cytotoxic |
| | | | dendritic cells | effects on a variety of cells are well known in the art and may be used or routinely modified to assess the |
| | | | | ability of polypeptides of the invention (including antibodies and agonists or antagonists of the invention) |
| | | | | to mediate immunomodulation, modulate inflammation and cytotoxicity. Exemplary assays that test for |
| | | | | immunomodulatory proteins evaluate the production of cytokines such as tumor necrosis factor alpha |
| | | | | (TNFa), and the induction or inhibition of an inflammatory or cytotoxic response. Such assays that may |
| | | | | be used or routinely modified to test immunomodulatory activity of polypeptides of the invention |
| | | | | (including antibodies and agonists or antagonists of the invention) include assays disclosed in Miraglia et |
| | | | | al., J Biomolecular Screening 4: 193-204(1999); Rowland et al., “Lymphocytes: a practical approach” |
| | | | | Chapter 6: 138-160 (2000); Verhasselt et al., Eur J Immunol 28(11): 3886-3890 (1198); Dablen et al., J |
| | | | | Immunol 160(7): 3585-3593 (1998); Verhasselt et al., J Immunol 158: 2919-2925 (1997); and Nardelli et |
| | | | | al., J Leukoc Biol 65: 822-828 (1999), the contents of each of which are herein incorporated by reference |
| | | | | in its entirety. Human dendritic cells that may be used according to these assays may be isolated using |
| | | | | techniques disclosed herein or otherwise known in the art. Human dendritic cells are antigen presenting |
| | | | | cells in suspension culture, which, when activated by antigen and/or cytokines, initiate and upregulate T |
| | | | | cell proliferation and functional activities. |
| 125 | HNTCE26 | 424 | Stimulation of | Assays for measuring secretion of insulin are well-known in the art and may be used or routinely |
| | | | insulin secretion | modified to assess the ability of polypeptides of the invention (including antibodies and agonists or |
| | | | from pancreatic | antagonists of the invention) to stimulate insulin secretion. For example, insulin secretion is measured by |
| | | | beta cells. | FMAT using anti-rat insulin antibodies. Insulin secretion from pancreatic beta cells is upregulated by |
| | | | | glucose and also by certain proteins/peptides, and disregulation is a key component in diabetes. |
| | | | | Exemplary assays that may be used or routinely modified to test for stimulation of insulin secretion (from |
| | | | | pancreatic cells) by polypeptides of the invention (including antibodies and agonists or antagonists of the |
| | | | | invention) include assays disclosed in: Ahren, B., et al., Am J Physiol, 277(4 Pt 2): R959-66 (1999); Li, M., |
| | | | | et al., Endocrinology, 138(9): 3735-40 (1997); Kim, K. H., et al., FEBS Lett, 377(2): 237-9 (1995); |
| | | | | and, Miraglia S et. al., Journal of Biomolecular Screening, 4: 193-204 (1999), the contents of each of |
| | | | | which is herein incorporated by reference in its entirety. Pancreatic cells that may be used according to |
| | | | | these assays are publicly available (e.g., through the ATCC) and/or may be routinely generated. |
| | | | | Exemplary pancreatic cells that may be used according to these assays include rat INS-1 cells. INS-1 |
| | | | | cells are a semi-adherent cell line established from cells isolated from an X-ray induced rat transplantable |
| | | | | insulinoma. These cells retain characteristics typical of native pancreatic beta cells including glucose |
| | | | | inducible insulin secretion. References: Asfari et al. Endocrinology 1992 130: 167. |
| 125 | HNTCE26 | 424 | Production of | Assays for measuring expression of ICAM-1 are well-known in the art and may be used or routinely |
| | | | ICAM-1 | modified to assess the ability of polypeptides of the invention (including antibodies and agonists or |
| | | | | antagonists of the invention) to regulate ICAM-1 expression. Exemplary assays that may be used or |
| | | | | routinely modified to measure ICAM-1 expression include assays disclosed in: Takacs P, et al, FASEB J, |
| | | | | 15(2): 279-281 (2001); and, Miyamoto K, et al., Am J Pathol, 156(5): 1733-1739 (2000), the contents of |
| | | | | each of which is herein incorporated by reference in its entirety. Cells that may be used according to |
| | | | | these assays are publicly available (e.g., through the ATCC) and/or may be routinely generated. |
| | | | | Exemplary cells that may be used according to these assays include microvascular endothelial cells |
| | | | | (MVEC). |
| 125 | HNTCE26 | 424 | Upregulation of | CD69 FMAT. CD69 is an activation marker that is expressed on activated T cells, B cells, and NK cells. |
| | | | CD69 and | CD69 is not expressed on resting T cells, B cells, or NK cells. CD69 has been found to be associated with |
| | | | activation of T | inflammation. Assays for immunomodulatory proteins expressed in T cells, B cells, and leukocytes are |
| | | | cells | well known in the art and may be used or routinely modified to assess the ability of polypeptides of the |
| | | | | invention (including antibodies and agonists or antagonists of the invention) to modulate the activation of |
| | | | | T cells, and/or mediate humoral or cell-mediated immunity. Exemplary assays that test for |
| | | | | immunomodulatory proteins evaluate the upregulation of cell surface markers, such as CD69, and the |
| | | | | activation of T cells. Such assays that may be used or routinely modified to test immunomodulatory |
| | | | | activity of polypeptides of the invention (including antibodies and agonists or antagonists of the |
| | | | | invention) include, for example, the assays disclosed in Miraglia et al., J Biomolecular Screening 4: 193-204 |
| | | | | (1999); Rowland et al., “Lymphocytes: a practical approach” Chapter 6: 138-160 (2000); Ferenczi et |
| | | | | al., J Autoimmun 14(1): 63-78 (200); Werfel et al., Allergy 52(4): 465-469 (1997); Taylor-Fishwick and |
| | | | | Siegel, Eur J Immunol 25(12): 3215-3221 (1995); and Afetra et at., Ann Rheum Dis 52(6): 457-460 |
| | | | | (1993), the contents of each of which are herein incorporated by reference in its entirety. Human T cells |
| | | | | that may be used according to these assays may be isolated using techniques disclosed herein or |
| | | | | otherwise known in the art. Human T cells are primary human lymphocytes that mature in the thymus |
| | | | | and express a T Cell receptor and CD3, CD4, or CD8. These cells mediate humoral or cell-mediated |
| | | | | immunity and may be preactivated to enhance responsiveness to immunomodulatory factors. |
| 126 | HNTNI01 | 425 | Regulation of | Assays for the regulation of transcription through the DMEF1 response element are well-known in the art |
| | | | transcription via | and may be used or routinely modified to assess the ability of polypeptides of the invention (including |
| | | | DMEF1 | antibodies and agonists or antagonists of the invention) to activate the DMEF1 response element in a |
| | | | response | reporter construct (such as that containing the GLUT4 promoter) and to regulate insulin production. The |
| | | | element in | DMEF1 response element is present in the GLUT4 promoter and binds to MEF2 transcription factor and |
| | | | adipocytes and | another transcription factor that is required for insulin regulation of Glut4 expression in skeletal muscle. |
| | | | pre-adipocytes | GLUT4 is the primary insulin-responsive glucose transporter in fat and muscle tissue. Exemplary assays |
| | | | | that may be used or routinely modified to test for DMEF1 response element activity (in adipocytes and |
| | | | | pre-adipocytes) by polypeptides of the invention (including antibodies and agonists or antagonists of the |
| | | | | invention) include assays disclosed inThai, M. V., et al., J Biol Chem, 273(23): 14285-92 (1998); Mora, S., |
| | | | | et al., J Biol Chem, 275(21): 16323-8 (2000); Liu, M. L., et al., J Biol Chem, 269(45): 28514-21 (1994); |
| | | | | “Identification of a 30-base pair regulatory element and novel DNA binding protein that regulates the |
| | | | | human GLUT4 promoter in transgenic mice”, J Biol Chem. 2000 Aug 4; 275(31): 23666-73; Berger, et al., |
| | | | | Gene 66: 1-10 (1988); and, Cullen, B., et al., Methods in Enzymol. 216: 362-368 (1992), the contents of |
| | | | | each of which is herein incorporated by reference in its entirety. Adipocytes and pre-adipocytes that may |
| | | | | be used according to these assays are publicly available (e.g., through the ATCC) and/or may be |
| | | | | routinely generated. Exemplary cells that may be used according to these assays include the mouse 3T3- |
| | | | | L1 cell line which is an adherent mouse preadipocyte cell line. Mouse 3T3-L1 cells are a continuous |
| | | | | substrain of 3T3 fibroblasts developed through clonal isolation. These cells undergo a pre-adipocyte to |
| | | | | adipose-like conversion under appropriate differentiation culture conditions. |
| 126 | HNTNI01 | 425 | Activation of | Assays for the activation of transcription through the cAMP response element are well-known in the art |
| | | | transcription | and may be used or routinely modified to assess the ability of polypeptides of the invention (including |
| | | | through cAMP | antibodies and agonists or antagonists of the invention) to increase cAMP, regulate CREB transcription |
| | | | response | factors, and modulate expression of genes involved in a wide variety of cell functions. For example, a |
| | | | element (CRE) | 3T3-L1/CRE reporter assay may be used to identify factors that activate the cAMP signaling pathway. |
| | | | in pre- | CREB plays a major role in adipogenesis, and is involved in differentiation into adipocytes. CRE |
| | | | adipocytes. | contains the binding sequence for the transcription factor CREB (CRE binding protein). Exemplary |
| | | | | assays for transcription through the cAMP response element that may be used or routinely modified to |
| | | | | test cAMP-response element activity of polypeptides of the invention (including antibodies and agonists |
| | | | | or antagonists of the invention) include assays disclosed in Berger et al., Gene 66: 1-10 (1998); Cullen |
| | | | | and Malm, Methods in Enzymol 216: 362-368 (1992); Henthorn et al., Proc Natl Acad Sci USA 85: 6342-6346 |
| | | | | (1988); Reusch et al., Mol Cell Biol 20(3): 1008-1020 (2000); and Klemm et al., J Biol Chem |
| | | | | 273: 917-923 (1998), the contents of each of which are herein incorporated by reference in its entirety. |
| | | | | Pre-adipocytes that may be used according to these assays are publicly available (e.g., through the |
| | | | | ATCC) and/or may be routinely generated. Exemplary mouse adipocyte cells that may be used according |
| | | | | to these assays include 3T3-L1 cells. 3T3-L1 is an adherent mouse preadipocyte cell line that is a |
| | | | | continuous substrain of 3T3 fibroblast cells developed through clonal isolation and undergo a pre- |
| | | | | adipocyte to adipose-like conversion under appropriate differentiation conditions known in the art. |
| 126 | HNTNI01 | 425 | Activation of | Assays for the activation of transcription through the Serum Response Element (SRE) are well-known in |
| | | | transcription | the art and may be used or routinely modified to assess the ability of polypeptides of the invention |
| | | | through serum | (including antibodies and agonists or antagonists of the invention) to regulate the serum response factors |
| | | | response | and modulate the expression of genes involved in growth. Exemplary assays for transcription through |
| | | | element in pre- | the SRE that may be used or routinely modified to test SRE activity of the polypeptides of the invention |
| | | | adipocytes. | (including antibodies and agonists or antagonists of the invention) include assays disclosed in Berger et |
| | | | | al., Gene 66: 1-10 (1998); Cullen and Malm, Methods in Enzymol 216: 362-368 (1992); Henthorn et al., |
| | | | | Proc Natl Acad Sci USA 85: 6342-6346 (1988); and Black et al., Virus Genes 12(2): 105-117 (1997), the |
| | | | | content of each of which are herein incorporated by reference in its entirety. Pre-adipocytes that may be |
| | | | | used according to these assays are publicly available (e.g., through the ATCC) and/or may be routinely |
| | | | | generated. Exemplary mouse adipocyte cells that may be used according to these assays include 3T3-L1 |
| | | | | cells. 3T3-L1 is an adherent mouse preadipocyte cell line that is a continuous substrain of 3T3 fibroblast |
| | | | | cells developed through clonal isolation and undergo a pre-adipocyte to adipose-like conversion under |
| | | | | appropriate differentiation conditions known in the art. |
| 126 | HNTNI01 | 425 | Activation of | Assays for the activation of transcription through the Gamma Interferon Activation Site (GAS) response |
| | | | transcription | element are well-known in the art and may be used or routinely modified to assess the ability of |
| | | | through GAS | polypeptides of the invention (including antibodies and agonists or antagonists of the invention) to |
| | | | response | modulate gene expression (commonly via STAT transcription factors) involved in a wide variety of cell |
| | | | element in | functions. Exemplary assays for transcription through the GAS response element that may be used or |
| | | | immune cells | routinely modified to test GAS-response element activity of polypeptides of the invention (including |
| | | | (such as | antibodies and agonists or antagonists of the invention) include assays disclosed in Berger et al., Gene |
| | | | eosinophils). | 66: 1-10 (1998); Cullen and Malm, Methods in Enzymol 216: 362-368 (1992); Henthorn et al., Proc Natl |
| | | | | Acad Sci USA 85: 6342-6346 (1988); Matikainen et al., Blood 93(6): 1980-1991 (1999); and Henttinen et |
| | | | | al., J Immunol 155(10): 4582-4587 (1995); the contents of each of which are herein incorporated by |
| | | | | reference in its entirety. Moreover, exemplary assays that may be used or routinely modified to assess |
| | | | | the ability of polypeptides of the invention (including antibodies and agonists or antagonists of the |
| | | | | invention) to activate or inhibit activation of immune cells include assays disclosed and/or cited in: |
| | | | | Mayumi M., “EoL-1, a human eosinophilic cell line” Leuk Lymphoma; Jun; 7(3): 243-50 (1992); |
| | | | | Bhattacharya S, “Granulocyte macrophage colony-stimulating factor and interleukin-5 activate STAT5 |
| | | | | and induce CIS1 mRNA in human peripheral blood eosinophils” Am J Respir Cell Mol Biol; |
| | | | | Mar; 24(3): 312-6 (2001); and, Du J, et al., “Engagement of the CrkL adapter in interleukin-5 signaling in |
| | | | | eosinophils” J Biol Chem; Oct 20; 275(42): 33167-75 (2000); the contents of each of which are herein |
| | | | | incorporated by reference in its entirety. Exemplary cells that may be used according to these assays |
| | | | | include eosinophils. Eosinophils are a type of immune cell important in the late stage of allergic |
| | | | | reactions; they are recruited to tissues and mediate the inflammtory response of late stage allergic |
| | | | | reaction. Increases in GAS mediated transcription in eosinophils is typically a result of STAT activation, |
| | | | | normally a direct consequence of interleukin or other cytokine receptor stimulation (e.g. IL3, IL5 or |
| | | | | GMCSF). |
| 126 | HNTNI01 | 425 | Activation of | Assays for the activation of transcription through the NFKB response element are well-known in the art |
| | | | transcription | and may be used or routinely modified to assess the ability of polypeptides of the invention (including |
| | | | through NFKB | antibodies and agonists or antagonists of the invention) to regulate NFKB transcription factors and |
| | | | response | modulate expression of immunomodulatory genes. Exemplary assays for transcription through the |
| | | | element in | NFKB response element that may be used or rountinely modified to test NFKB-response element activity |
| | | | immune cells | of polypeptides of the invention (including antibodies and agonists or antagonists of the invention) |
| | | | (such as EOL1 | include assays disclosed in Berger et al., Gene 66: 1-10 (1998); Cullen and Malm, Methods in Enzymol |
| | | | cells). | 216: 362-368 (1992); Henthorn et al., Proc Natl Acad Sci USA 85: 6342-6346 (1988); Valle Blazquez et |
| | | | | al, Immunology 90(3): 455-460 (1997); Aramburau et al., J Exp Med 82(3): 801-810 (1995); and Fraser et |
| | | | | al., 29(3): 838-844 (1999), the contents of each of which are herein incorporated by reference in its |
| | | | | entirety. For example, a reporter assay (which measures increases in transcription inducible from a |
| | | | | NFkB responsive element in EOL-1 cells) may link the NFKB element to a repeorter gene and binds to |
| | | | | the NFKB transcription factor, which is upregulated by cytokines and other factors. Exemplary immune |
| | | | | cells that may be used according to these assays include eosinophils such as the human EOL-1 cell line of |
| | | | | eosinophils. Eosinophils are a type of immune cell important in the allergic responses; they are recruited |
| | | | | to tissues and mediate the inflammtory response of late stage allergic reaction. Eol-1 is a human |
| | | | | eosinophil cell line. |
| 126 | HNTNI01 | 425 | Regulation of | Assays for the regulation of transcription of Malic Enzyme are well-known in the art and may be used or |
| | | | transcription of | routinely modified to assess the ability of polypeptides of the invention (including antibodies and |
| | | | Malic Enzyme | agonists or antagonists of the invention) to regulate transcription of Malic Enzyme, a key enzyme in |
| | | | in adipocytes | lipogenesis. Malic enzyme is involved in lipogenesisand its expression is stimulted by insulin. ME |
| | | | | promoter contains two direct repeat (DR1)-like elements MEp and MEd identified as putative PPAR |
| | | | | response elements. ME promoter may also responds to AP1 and other transcription factors. Exemplary |
| | | | | assays that may be used or routinely modified to test for regulation of transcription of Malic Enzyme (in |
| | | | | adipoocytes) by polypeptides of the invention (including antibodies and agonists or antagonists of the |
| | | | | invention) include assays disclosed in: Streeper, R. S., et al., Mol Endocrinol, 12(11): 1778-91 (1998); |
| | | | | Garcia-Jimenez, C., et al., Mol Endocrinol, 8(10): 1361-9 (1994); Barroso, I., et al., J Biol Chem, |
| | | | | 274(25): 17997-8004 (1999); Ijpenberg, A., et al, J Biol Chem, 272(32): 20108-20117 (1997); Berger, et |
| | | | | al., Gene 66: 1-10 (1988); and, Cullen, B., et al., Methods in Euzymol. 216: 362-368 (1992), the contents |
| | | | | of each of which is herein incorporated by reference in its entirety. Hepatocytes that may be used |
| | | | | according to these assays are publicly available (e.g., through the ATCC) and/or may be routinely |
| | | | | generated. Exemplary hepatocytes that may be used according to these assays includes the H4IIE rat |
| | | | | liver hepatoma cell line. |
| 126 | HNTNI01 | 425 | Activation of | This reporter assay measures activation of the GATA-3 signaling pathway in HMC-1 human mast cell |
| | | | transcription | line. Activation of GATA-3 in mast cells has been linked to cytokine and chemokine production. Assays |
| | | | through GATA- | for the activation of transcription through the GATA3 response element are well-known in the art and |
| | | | 3 response | may be used or routinely modified to assess the ability of polypeptides of the invention (including |
| | | | element in | antibodies and agonists or antagonists of the invention) to regulate GATA3 transcription factors and |
| | | | immune cells | modulate expression of mast cell genes important for immune response development. Exemplary assays |
| | | | (such as mast | for transcription through the GATA3 response element that may be used or routinely modified to test |
| | | | cells). | GATA3-response element activity of polypeptides of the invention (including antibodies and agonists or |
| | | | | antagonists of the invention) include assays disclosed in Berger et al., Gene 66: 1-10 (1998); Cullen and |
| | | | | Malm, Methods in Enzymol 216: 362-368 (1992); Henthorn et al., Proc Natl Acad Sci USA 85: 6342-6346 |
| | | | | (1988); Flavell et al., Cold Spring Harb Symp Quant Biol 64: 563-571 (1999); Rodriguez-Palmero et al., |
| | | | | Eur J Immunol 29(12): 3914-3924 (1999); Zheng and Flavell, Cell 89(4): 587-596 (1997); and Henderson |
| | | | | et al., Mol Cell Biol 14(6): 4286-4294 (1994), the contents of each of which are herein incorporated by |
| | | | | reference in its entirety. Mast cells that may be used according to these assays are publicly available |
| | | | | (e.g., through the ATCC). Exemplary human mast cells that may be used according to these assays |
| | | | | include the HMC-1 cell line, which is an immature human mast cell line established from the peripheral |
| | | | | blood of a patient with mast cell leukemia, and exhibits many characteristics of immature mast cells. |
| 126 | HNTNI01 | 425 | Activation of | This reporter assay measures activation of the NFAT signaling pathway in HMC-1 human mast cell line. |
| | | | transcription | Activation of NFAT in mast cells has been linked to cytokine and chemokine production. Assays for the |
| | | | through NFAT | activation of transcription through the Nuclear Factor of Activated T cells (NFAT) response element are |
| | | | response | well-known in the art and may be used or routinely modified to assess the ability of polypeptides of the |
| | | | element in | invention (including antibodies and agonists or antagonists of the invention) to regulate NFAT |
| | | | immune cells | transcription factors and modulate expression of genes involved in immunomodulatory functions. |
| | | | (such as mast | Exemplary assays for transcription through the NFAT response element that may be used or routinely |
| | | | cells). | modified to test NFAT-response element activity of polypeptides of the invention (including antibodies |
| | | | | and agonists or antagonists of the invention) include assays disclosed in Berger et al., Gene 66: 1-10 |
| | | | | (1998); Cullen and Malm, Methods in Enzymol 216: 362-368 (1992); Henthorn et al., Proc Natl Acad Sci |
| | | | | USA 85: 6342-6346 (1988); De Boer et al., Int J Biochem Cell Biol 31(10): 1221-1236 (1999); Ali et al., J |
| | | | | Immunol 165(12): 7215-7223 (2000); Hutchinson and McCloskey, J Biol Chem 270(27): 16333-16338 |
| | | | | (1995), and Turner et al., J Exp Med 188: 527-537 (1998), the contents of each of which are herein |
| | | | | incorporated by reference in its entirety. Mast cells that may be used according to these assays are |
| | | | | publicly available (e.g., through the ATCC). Exemplary human mast cells that may be used according to |
| | | | | these assays include the HMC-1 cell line, which is an immature human mast cell line established from |
| | | | | the peripheral blood of a patient with mast cell leukemia, and exhibits many characteristics of immature |
| | | | | mast cells. |
| 126 | HNTNI01 | 425 | Activation of | This reporter assay measures activation of the NFkB signaling pathway in HMC-1 human mast cell line. |
| | | | transcription | Activation of NFkB in mast cells has been linked to production of certain cytokines, such as IL-6 and IL- |
| | | | through NFKB | 9. Assays for the activation of transcription through the NFKB response element are well-known in the |
| | | | response | art and may be used or routinely modified to assess the ability of polypeptides of the invention (including |
| | | | element in | antibodies and agonists or antagonists of the invention) to regulate NFKB transcription factors and |
| | | | immune cells | modulate expression of immunomodulatory genes. Exemplary assays for transcription through the |
| | | | (such as mast | NFKB response element that may be used or rountinely modified to test NFKB-response element activity |
| | | | cells). | of polypeptides of the invention (including antibodies and agonists or antagonists of the invention) |
| | | | | include assays disclosed in Berger et al., Gene 66: 1-10 (1998); Cullen and Malm, Methods in Enzymol |
| | | | | 216: 362-368 (1992); Henthorn et al., Proc Natl Acad Sci USA 85: 6342-6346 (1988); Stassen et al, J |
| | | | | Immunol 166(7): 4391-8 (2001); and Marquardt and Walker, J Allergy Clin Immunol 105(3): 500-5 |
| | | | | (2000), the contents of each of which are herein incorporated by reference in its entirety. Mast cells that |
| | | | | may be used according to these assays are publicly available (e.g., through the ATCC). Exemplary |
| | | | | human mast cells that may be used according to these assays include the HMC-1 cell line, which is an |
| | | | | immature human mast cell line established from the peripheral blood of a patient with mast cell leukemia, |
| | | | | and exhibits many characteristics of immature mast cells. |
| 126 | HNTNI01 | 425 | Activation of | Assays for the activation of transcription through the Signal Transducers and Activators of Transcription |
| | | | transcription | (STAT6) response element in immune cells (such as in the human HMC-1 mast cell line) are well-known |
| | | | through STAT6 | in the art and may be used or routinely modified to assess the ability of polypeptides of the invention |
| | | | response | (including antibodies and agonists or antagonists of the invention) to regulate STAT6 transcription |
| | | | element in | factors and modulate the expression of multiple genes. Exemplary assays for transcription through the |
| | | | immune cells | STAT6 response element that may be used or routinely modified to test STAT6 response element activity |
| | | | (such as mast | of the polypeptides of the invention (including antibodies and agonists or antagonists of the invention) |
| | | | cells). | include assays disclosed in Berger et al., Gene 66: 1-10 (1998); Cullen and Malm, Methods in Enzymol |
| | | | | 216: 362-368 (1992); Henthorn et al., Proc Natl Acad Sci USA 85: 6342-6346(1988); Sherman, Immunol |
| | | | | Rev 179: 48-56 (2001); Malaviya and Uckun, J Immunol 168: 421-426 (2002); Masuda et al., J Biol Chem |
| | | | | 275(38): 29331-29337 (2000); and Masuda et al., J Biol Chem 276: 26107-26113 (2001), the contents of |
| | | | | each of which are herein incorporated by reference in its entirety. Mast cells that may be used according |
| | | | | to these assays are publicly available (e.g., through the ATCC). Exemplary human mast cells that may be |
| | | | | used according to these assays include the HMC-1 cell line, which is an immature human mast cell line |
| | | | | established from the peripheral blood of a patient with mast cell leukemia, and exhibits many |
| | | | | characteristics of immature mast cells. |
| 126 | HNTNI01 | 425 | Activation of | This reporter assay measures activation of the NFkB signaling pathway in Ku812 human basophil cell |
| | | | transcription | line. Assays for the activation of transcription through the NFKB response element are well-known in the |
| | | | through NFKB | art and may be used or routinely modified to assess the ability of polypeptides of the invention (including |
| | | | response | antibodies and agonists or antagonists of the invention) to regulate NFKB transcription factors and |
| | | | element in | modulate expression of immunomodulatory genes. Exemplary assays for transcription through the |
| | | | immune cells | NFKB response element that may be used or rountinely modified to test NFKB-response element activity |
| | | | (such as | of polypeptides of the invention (including antibodies and agonists or antagonists of the invention) |
| | | | basophils). | include assays disclosed in Berger et al., Gene 66: 1-10 (1998); Cullen and Malm, Methods in Enzymol |
| | | | | 216: 362-368 (1992); Henthorn et al., Proc Natl Acad Sci USA 85: 6342-6346 (1988); Marone et al, Int |
| | | | | Arch Allergy Immunol 114(3): 207-17 (1997), the contents of each of which are herein incorporated by |
| | | | | reference in its entirety. Basophils that may be used according to these assays are publicly available |
| | | | | (e.g., through the ATCC). Exemplary human basophil cell lines that may be used according to these |
| | | | | assays include Ku812, originally established from a patient with chronic myelogenous leukemia. It is an |
| | | | | immature prebasophilic cell line that can be induced to differentiate into mature basophils. |
| 126 | HNTNI01 | 425 | Activation of | Assays for the activation of transcription through the Serum Response Element (SRE) are well-known in |
| | | | transcription | the art and may be used or routinely modified to assess the ability of polypeptides of the invention |
| | | | through serum | (including antibodies and agonists or antagonists of the invention) to bind the serum response factor and |
| | | | response | modulate the expression of genes involved in growth and upregulate the function of growth-related genes |
| | | | element in | in many cell types. Exemplary assays for transcription through the SRE that may be used or routinely |
| | | | immune cells | modified to test SRE activity of the polypeptides of the invention (including antibodies and agonists or |
| | | | (such as T- | antagonists of the invention) include assays disclosed in Berger et al., Gene 66: 1-10 (1998); Cullen and |
| | | | cells). | Malm, Methods in Enzymol 216: 362-368 (1992); Henthorn et al., Proc Natl Acad Sci USA 85: 6342-6346 |
| | | | | (1988); Benson et al., J Immunol 153(9): 3862-3873 (1994); and Black et al., Virus Genes 12(2): 105-117 |
| | | | | (1997), the content of each of which are herein incorporated by reference in its entirety. T cells that may |
| | | | | be used according to these assays are publicly available (e.g., through the ATCC). Exemplary human T |
| | | | | cells, such as the MOLT4, that may be used according to these assays are publicly available (e.g., through |
| | | | | the ATCC). |
| 126 | HNTNI01 | 425 | Activation of | Assays for the activation of transcription through the Signal Transducers and Activators of Transcription |
| | | | transcription | (STAT6) response element are well-known in the art and may be used or routinely modified to assess the |
| | | | through STAT6 | ability of polypeptides of the invention (including antibodies and agonists or antagonists of the invention) |
| | | | response | to regulate STAT6 transcription factors and modulate the expression of multiple genes. Exemplary |
| | | | element in | assays for transcription through the STAT6 response element that may be used or routinely modified to |
| | | | immune cells | test STAT6 response element activity of the polypeptides of the invention (including antibodies and |
| | | | (such as natural | agonists or antagonists of the invention) include assays disclosed in Berger et al., Gene 66: 1-10 (1998); |
| | | | killer cells). | Cullen and Malm, Methods in Enzymol 216: 362-368 (1992); Henthorn et al., Proc Natl Acad Sci USA |
| | | | | 85: 6342-6346 (1988); Georas et al., Blood 92(12): 4529-4538 (1998); Moffatt et al., Transplantation |
| | | | | 69(7): 1521-1523 (2000); Curiel et al., Eur J Immunol 27(8): 1982-1987 (1997); and Masuda et al., J Biol |
| | | | | Chem 275(38): 29331-29337 (2000), the contents of each of which are herein incorporated by reference in |
| | | | | its entirety. T cells that may be used according to these assays are publicly available (e.g., through the |
| | | | | ATCC). Exemplary rat natural killer cells that may be used according to these assays are publicly |
| | | | | available (e.g., through the ATCC). |
| 126 | HNTNI01 | 425 | Activation of | Assays for the activation of transcription through the Gamma Interferon Activation Site (GAS) response |
| | | | transcription | element are well-known in the art and may be used or routinely modified to assess the ability of |
| | | | through GAS | polypeptides of the invention (including antibodies and agonists or antagonists of the invention) to |
| | | | response | regulate STAT transcription factors and modulate gene expression involved in a wide variety of cell |
| | | | element in | functions. Exemplary assays for transcription through the GAS response element that may be used or |
| | | | immune cells | routinely modified to test GAS-response element activity of polypeptides of the invention (including |
| | | | (such as T- | antibodies and agonists or antagonists of the invention) include assays disclosed in Berger et al., Gene |
| | | | cells). | 66: 1-10 (1998); Cullen and Malm, Methods in Enzymol 216: 362-368 (1992); Henthorn et al., Proc Natl |
| | | | | Acad Sci USA 85: 6342-6346 (1988); Matikainen et al., Blood 93(6): 1980-1991 (1999); and Henttinen et |
| | | | | al., J Immunol 155(10): 4582-4587 (1995), the contents of each of which are herein incorporated by |
| | | | | reference in its entirety. Exemplary human T cells, such as the SUPT cell line, that may be used |
| | | | | according to these assays are publicly available (e.g., through the ATCC). |
| 126 | HNTNI01 | 425 | Activation of | Assays for the activation of transcription through the Nuclear Factor of Activated T cells (NFAT) |
| | | | transcription | response element are well-known in the art and may be used or routinely modified to assess the ability of |
| | | | through NFAT | polypeptides of the invention (including antibodies and agonists or antagonists of the invention) to |
| | | | response | regulate NFAT transcription factors and modulate expression of genes involved in immunomodulatory |
| | | | element in | functions. Exemplary assays for transcription through the NFAT response element that may be used or |
| | | | immune cells | routinely modified to test NFAT-response element activity of polypeptides of the invention (including |
| | | | (such as natural | antibodies and agonists or antagonists of the invention) include assays disclosed in Berger et al., Gene |
| | | | killer cells). | 66: 1-10 (1998); Cullen and Malm, Methods in Enzymol 216: 362-368 (1992); Henthorn et al., Proc Natl |
| | | | | Acad Sci USA 85: 6342-6346 (1988); Aramburu et al., J Exp Med 182(3): 801-810 (1995); De Boer et al., |
| | | | | Int J Biochem Cell Biol 31(10): 1221-1236 (1999); Fraser et al., Eur J Immunol 29(3): 838-844 (1999); |
| | | | | and Yeseen et al., J Biol Chem 268(19): 14285-14293 (1993), the contents of each of which are herein |
| | | | | incorporated by reference in its entirety. NK cells that may be used according to these assays are |
| | | | | publicly available (e.g., through the ATCC). Exemplary human NK cells that may be used according to |
| | | | | these assays include the NK-YT cell line, which is a human natural killer cell line with cytolytic and |
| | | | | cytotoxic activity. |
| 127 | HODDF13 | 426 | Regulation of | Assays for the regulation of transcription through the FAS promoter element are well-known in the art |
| | | | transcription | and may be used or routinely modified to assess the ability of polypeptides of the invention (including |
| | | | through the FAS | antibodies and agonists or antagonists of the invention) to activate the FAS promoter element in a |
| | | | promoter | reporter construct and to regulate transcription of FAS, a key enzyme for lipogenesis. FAS promoter is |
| | | | element in | regulated by many transcription factors including SREBP. Insulin increases FAS gene transcription in |
| | | | hepatocytes | livers of diabetic mice. This stimulation of transcription is also somewhat glucose dependent. |
| | | | | Exemplary assays that may be used or routinely modified to test for FAS promoter element activity (in |
| | | | | hepatocytes) by polypeptides of the invention (including antibodies and agonists or antagonists of the |
| | | | | invention) include assays disclosed in Xiong, S., et al., Proc Natl Acad Sci U.S.A., 97(8): 3948-53 (2000); |
| | | | | Roder, K., et al., Eur J Biochem, 260(3): 743-51 (1999); Oskouian B, et al., Biochem J, 317 (Pt 1): 257-65 |
| | | | | (1996); Berger, et al., Gene 66: 1-10 (1988); and, Cullen, B., et al., Methods in Enzymol. 216: 362-368 |
| | | | | (1992), the contents of each of which is herein incorporated by reference in its entirety. Hepatocytes that |
| | | | | may be used according to these assays, such as H4IIE cells, are publicly available (e.g., through the |
| | | | | ATCC) and/or may be routinely generated. Exemplary hepatocytes that may be used according to these |
| | | | | assays include rat liver hepatoma cell line(s) inducible with glucocorticoids, insulin, or cAMP |
| | | | | derivatives. |
| 127 | HODDF13 | 426 | Activation of | This reporter assay measures activation of the GATA-3 signaling pathway in HMC-1 human mast cell |
| | | | transcription | line. Activation of GATA-3 in mast cells has been linked to cytokine and chemokine production. Assays |
| | | | through GATA- | for the activation of transcription through the GATA3 response element are well-known in the art and |
| | | | 3 response | may be used or routinely modified to assess the ability of polypeptides of the invention (including |
| | | | element in | antibodies and agonists or antagonists of the invention) to regulate GATA3 transcription factors and |
| | | | immune cells | modulate expression of mast cell genes important for immune response development. Exemplary assays |
| | | | (such as mast | for transcription through the GATA3 response element that may be used or routinely modified to test |
| | | | cells). | GATA3-response element activity of polypeptides of the invention (including antibodies and agonists or |
| | | | | antagonists of the invention) include assays disclosed in Berger et al., Gene 66: 1-10 (1998); Cullen and |
| | | | | Malm, Methods in Enzymol 216: 362-368 (1992); Henthorn et al., Proc Natl Acad Sci USA 85: 6342-6346 |
| | | | | (1988); Flavell et al., Cold Spring Harb Symp Quant Biol 64: 563-571 (1999); Rodriguez-Palmero et al., |
| | | | | Eur J Immunol 29(12): 3914-3924 (1999); Zheng and Flavell, Cell 89(4): 587-596 (1997); and Henderson |
| | | | | et al., Mol Cell Biol 14(6): 4286-4294 (1994), the contents of each of which are herein incorporated by |
| | | | | reference in its entirety. Mast cells that may be used according to these assays are publicly available |
| | | | | (e.g., through the ATCC). Exemplary human mast cells that may be used according to these assays |
| | | | | include the HMC-1 cell line, which is an immature human mast cell line established from the peripheral |
| | | | | blood of a patient with mast cell leukemia, and exhibits many characteristics of immature mast cells. |
| 127 | HODDF13 | 426 | Activation of | This reporter assay measures activation of the NFAT signaling pathway in HMC-1 human mast cell line. |
| | | | transcription | Activation of NFAT in mast cells has been linked to cytokine and chemokine production. Assays for the |
| | | | through NFAT | activation of transcription through the Nuclear Factor of Activated T cells (NFAT) response element are |
| | | | response | well-known in the art and may be used or routinely modified to assess the ability of polypeptides of the |
| | | | element in | invention (including antibodies and agonists or antagonists of the invention) to regulate NFAT |
| | | | immune cells | transcription factors and modulate expression of genes involved in immunomodulatory functions. |
| | | | (such as mast | Exemplary assays for transcription through the NFAT response element that may be used or routinely |
| | | | cells). | modified to test NFAT-response element activity of polypeptides of the invention (including antibodies |
| | | | | and agonists or antagonists of the invention) include assays disclosed in Berger et al., Gene 66: 1-10 |
| | | | | (1998); Cullen and Malm, Methods in Enzymol 216: 362-368 (1992); Henthorn et al., Proc Natl Acad Sci |
| | | | | USA 85: 6342-6346 (1988); De Boer et al., Int J Biochem Cell Biol 31(10): 1221-1236 (1999); Ali et al., J |
| | | | | Immunol 165(12): 7215-7223 (2000); Hutchinson and McCloskey, J Biol Chem 270(27): 16333-16338 |
| | | | | (1995), and Turner et al., J Exp Med 188: 527-537 (1998), the contents of each of which are herein |
| | | | | incorporated by reference in its entirety. Mast cells that may be used according to these assays are |
| | | | | publicly available (e.g., through the ATCC). Exemplary human mast cells that may be used according to |
| | | | | these assays include the HMC-1 cell line, which is an immature human mast cell line established from |
| | | | | the peripheral blood of a patient with mast cell leukemia, and exhibits many characteristics of immature |
| | | | | mast cells. |
| 128 | HODDN92 | 427 | Production of | MIP-1alpha FMAT. Assays for immunomodulatory proteins produced by activated dendritic cells that |
| | | | MIP1alpha | upregulate monocyte/macrophage and T cell chemotaxis are well known in the art and may be used or |
| | | | | routinely modified to assess the ability of polypeptides of the invention (including antibodies and |
| | | | | agonists or antagonists of the invention) to mediate immunomodulation, modulate chemotaxis, and |
| | | | | modulate T cell differentiation. Exemplary assays that test for immunomodulatory proteins evaluate the |
| | | | | production of chemokines, such as macrophage inflammatory protein 1 alpha (MIP-1a), and the |
| | | | | activation of monocytes/macrophages and T cells. Such assays that may be used or routinely modified to |
| | | | | test immunomodulatory and chemotaxis activity of polypeptides of the invention (including antibodies |
| | | | | and agonists or antagonists of the invention) include assays disclosed in Miraglia et al., J Biomolecular |
| | | | | Screening 4: 193-204(1999); Rowland et al., “Lymphocytes: a practical approach” Chapter 6: 138-160 |
| | | | | (2000); Satthaporn and Eremin, J R Coll Surg Ednb 45(1): 9-19 (2001); Drakes et al., Transp Immunol |
| | | | | 8(1): 17-29 (2000); Verhasselt et al., J Immunol 158: 2919-2925 (1997); and Nardelli et al., J Leukoc Biol |
| | | | | 65: 822-828 (1999), the contents of each of which are herein incorporated by reference in its entirety. |
| | | | | Human dendritic cells that may be used according to these assays may be isolated using techniques |
| | | | | disclosed herein or otherwise known in the art. Human dendritic cells are antigen presenting cells in |
| | | | | suspension culture, which, when activated by antigen and/or cytokines, initiate and upregulate T cell |
| | | | | proliferation and functional activities. |
| 128 | HODDN92 | 427 | Production of | MCP-1 FMAT. Assays for immunomodulatory proteins that are produced by a large variety of cells and |
| | | | MCP-1 | act to induce chemotaxis and activation of monocytes and T cells are well known in the art and may be |
| | | | | used or routinely modified to assess the ability of polypeptides of the invention (including antibodies and |
| | | | | agonists or antagonists of the invention) to mediate immunomodulation, induce chemotaxis, and |
| | | | | modulate immune cell activation. Exemplary assays that test for immunomodulatory proteins evaluate |
| | | | | the production of cell surface markers, such as monocyte chemoattractant protein (MCP), and the |
| | | | | activation of monocytes and T cells. Such assays that may be used or routinely modified to test |
| | | | | immunomodulatory and differentiation activity of polypeptides of the invention (including antibodies |
| | | | | and agonists or antagonists of the invention) include assays disclosed in Miraglia et al., J Biomolecular |
| | | | | Screening 4: 193-204(1999); Rowland et al., “Lymphocytes: a practical approach” Chapter 6: 138-160 |
| | | | | (2000); Satthaporn and Eremin, J R Coll Surg Ednb 45(1): 9-19 (2001); and Verhasselt et al., J Immunol |
| | | | | 158: 2919-2925 (1997), the contents of each of which are herein incorporated by reference in its entirety. |
| | | | | Human dendritic cells that may be used according to these assays may be isolated using techniques |
| | | | | disclosed herein or otherwise known in the art. Human dendritic cells are antigen presenting cells in |
| | | | | suspension culture, which, when activated by antigen and/or cytokines, initiate and upregulate T cell |
| | | | | proliferation and functional activities. |
| 128 | HODDN92 | 427 | Production of | IL-6 FMAT. IL-6 is produced by T cells and has strong effects on B cells. IL-6 participates in IL-4 |
| | | | IL-6 | induced IgE production and increases IgA production (IgA plays a role in mucosal immunity). IL-6 |
| | | | | induces cytotoxic T cells. Deregulated expression of IL-6 has been linked to autoimmune disease, |
| | | | | plasmacytomas, myelomas, and chronic hyperproliferative diseases. Assays for immunomodulatory and |
| | | | | differentiation factor proteins produced by a large variety of cells where the expression level is strongly |
| | | | | regulated by cytokines, growth factors, and hormones are well known in the art and may be used or |
| | | | | routinely modified to assess the ability of polypeptides of the invention (including antibodies and |
| | | | | agonists or antagonists of the invention) to mediate immunomodulation and differentiation and modulate |
| | | | | T cell proliferation and function. Exemplary assays that test for immunomodulatory proteins evaluate the |
| | | | | production of cytokines, such as IL-6, and the stimulation and upregulation of T cell proliferation and |
| | | | | functional activities. Such assays that may be used or routinely modified to test immunomodulatory and |
| | | | | differentiation activity of polypeptides of the invention (including antibodies and agonists or antagonists |
| | | | | of the invention) include assays disclosed in Miraglia et al., J Biomolecular Screening 4: 193-204(1999); |
| | | | | Rowland et al., “Lymphocytes: a practical approach” Chapter 6: 138-160 (2000); and Verhasselt et al., J |
| | | | | Immunol 158: 2919-2925 (1997), the contents of each of which are herein incorporated by reference in its |
| | | | | entirety. Human dendritic cells that may be used according to these assays may be isolated using |
| | | | | techniques disclosed herein or otherwise known in the art. Human dendritic cells are antigen presenting |
| | | | | cells in suspension culture, which, when activated by antigen and/or cytokines, initiate and upregulate T |
| | | | | cell proliferation and functional activities. |
| 128 | HODDN92 | 427 | Regulation of | Assays for the regulation of transcription through the FAS promoter element are well-known in the art |
| | | | transcription | and may be used or routinely modified to assess the ability of polypeptides of the invention (including |
| | | | through the FAS | antibodies and agonists or antagonists of the invention) to activate the FAS promoter element in a |
| | | | promoter | reporter construct and to regulate transcription of FAS, a key enzyme for lipogenesis. FAS promoter is |
| | | | element in | regulated by many transcription factors including SREBP. Insulin increases FAS gene transcription in |
| | | | hepatocytes | livers of diabetic mice. This stimulation of transcription is also somewhat glucose dependent. |
| | | | | Exemplary assays that may be used or routinely modified to test for FAS promoter element activity (in |
| | | | | hepatocytes) by polypeptides of the invention (including antibodies and agonists or antagonists of the |
| | | | | invention) include assays disclosed in Xiong, S., et al., Proc Natl Acad Sci U.S.A., 97(8): 3948-53 (2000); |
| | | | | Roder, K., et al., Eur J Biochem, 260(3): 743-51 (1999); Oskouian B, et al., Biochem J, 317 (Pt 1): 257-65 |
| | | | | (1996); Berger, et al., Gene 66: 1-10 (1988); and, Cullen, B., et al., Methods in Enzymol. 216: 362-368 |
| | | | | (1992), the contents of each of which is herein incorporated by reference in its entirety. Hepatocytes that |
| | | | | may be used according to these assays, such as H4IIE cells, are publicly available (e.g., through the |
| | | | | ATCC) and/or may be routinely generated. Exemplary hepatocytes that may be used according to these |
| | | | | assays include rat liver hepatoma cell line(s) inducible with glucocorticoids, insulin, or cAMP |
| | | | | derivatives. |
| 128 | HODDN92 | 427 | Activation of | This reporter assay measures activation of the GATA-3 signaling pathway in HMC-1 human mast cell |
| | | | transcription | line. Activation of GATA-3 in mast cells has been linked to cytokine and chemokine production. Assays |
| | | | through GATA- | for the activation of transcription through the GATA3 response element are well-known in the art and |
| | | | 3 response | may be used or routinely modified to assess the ability of polypeptides of the invention (including |
| | | | element in | antibodies and agonists or antagonists of the invention) to regulate GATA3 transcription factors and |
| | | | immune cells | modulate expression of mast cell genes important for immune response development. Exemplary assays |
| | | | (such as mast | for transcription through the GATA3 response element that may be used or routinely modified to test |
| | | | cells). | GATA3-response element activity of polypeptides of the invention (including antibodies and agonists or |
| | | | | antagonists of the invention) include assays disclosed in Berger et al., Gene 66: 1-10 (1998); Cullen and |
| | | | | Malm, Methods in Enzymol 216: 362-368 (1992); Henthorn et al., Proc Natl Acad Sci USA 85: 6342-6346 |
| | | | | (1988); Flavell et al., Cold Spring Harb Symp Quant Biol 64: 563-571 (1999); Rodriguez-Palmero et al., |
| | | | | Eur J Immunol 29(12): 3914-3924 (1999); Zheng and Flavell, Cell 89(4): 587-596 (1997); and Henderson |
| | | | | et al., Mol Cell Biol 14(6): 4286-4294 (1994), the contents of each of which are herein incorporated by |
| | | | | reference in its entirety. Mast cells that may be used according to these assays are publicly available |
| | | | | (e.g., through the ATCC). Exemplary human mast cells that may be used according to these assays |
| | | | | include the HMC-1 cell line, which is an immature human mast cell line established from the peripheral |
| | | | | blood of a patient with mast cell leukemia, and exhibits many characteristics of immature mast cells. |
| 128 | HODDN92 | 427 | Activation of | This reporter assay measures activation of the NFAT signaling pathway in HMC-1 human mast cell line. |
| | | | transcription | Activation of NFAT in mast cells has been linked to cytokine and chemokine production. Assays for the |
| | | | through NFAT | activation of transcription through the Nuclear Factor of Activated T cells (NFAT) response element are |
| | | | response | well-known in the art and may be used or routinely modified to assess the ability of polypeptides of the |
| | | | element in | invention (including antibodies and agonists or antagonists of the invention) to regulate NFAT |
| | | | immune cells | transcription factors and modulate expression of genes involved in immunomodulatory functions. |
| | | | (such as mast | Exemplary assays for transcription through the NFAT response element that may be used or routinely |
| | | | cells). | modified to test NFAT-response element activity of polypeptides of the invention (including antibodies |
| | | | | and agonists or antagonists of the invention) include assays disclosed in Berger et al., Gene 66: 1-10 |
| | | | | (1998); Cullen and Malm, Methods in Enzymol 216: 362-368 (1992); Henthorn et al., Proc Natl Acad Sci |
| | | | | USA 85: 6342-6346 (1988); De Boer et al., Int J Biochem Cell Biol 31(10): 1221-1236 (1999); Ali et al., J |
| | | | | Immunol 165(12): 7215-7223 (2000); Hutchinson and McCloskey, J Biol Chem 270(27): 16333-16338 |
| | | | | (1995), and Turner et al., J Exp Med 188: 527-537 (1998), the contents of each of which are herein |
| | | | | incorporated by reference in its entirety. Mast cells that may be used according to these assays are |
| | | | | publicly available (e.g., through the ATCC). Exemplary human mast cells that may be used according to |
| | | | | these assays include the HMC-1 cell line, which is an immature human mast cell line established from |
| | | | | the peripheral blood of a patient with mast cell leukemia, and exhibits many characteristics of immature |
| | | | | mast cells. |
| 128 | HODDN92 | 427 | Activation of | Kinase assay. JNK and p38 kinase assays for signal transduction that regulate cell proliferation, |
| | | | Endothelial Cell | activation, or apoptosis are well known in the art and may be used or routinely modified to assess the |
| | | | p38 or JNK | ability of polypeptides of the invention (including antibodies and agonists or antagonists of the invention) |
| | | | Signaling | to promote or inhibit cell proliferation, activation, and apoptosis. Exemplary assays for JNK and p38 |
| | | | Pathway. | kinase activity that may be used or routinely modified to test JNK and p38 kinase-induced activity of |
| | | | | polypeptides of the invention (including antibodies and agonists or antagonists of the invention) include |
| | | | | the assays disclosed in Forrer et al., Biol Chem 379(8-9): 1101-1110 (1998); Gupta et al., Exp Cell Res |
| | | | | 247(2): 495-504 (1999); Kyriakis JM, Biochem Soc Symp 64: 29-48 (1999); Chang and Karin, Nature |
| | | | | 410(6824): 37-40 (2001); and Cobb MH, Prog Biophys Mol Biol 71(3-4): 479-500 (1999); the contents of |
| | | | | each of which are herein incorporated by reference in its entirety. Endothelial cells that may be used |
| | | | | according to these assays are publicly available (e.g., through the ATCC). Exemplary endothelial cells |
| | | | | that may be used according to these assays include human umbilical vein endothelial cells (HUVEC), |
| | | | | which are endothelial cells which line venous blood vessels, and are involved in functions that include, |
| | | | | but are not limited to, angiogenesis, vascular permeability, vascular tone, and immune cell extravasation. |
| 129 | HOFMQ33 | 428 | Regulation of | Assays for the regulation of viability and proliferation of cells in vitro are well-known in the art and may |
| | | | viability and | be used or routinely modified to assess the ability of polypeptides of the invention (including antibodies |
| | | | proliferation of | and agonists or antagonists of the invention) to regulate viability and proliferation of pancreatic beta |
| | | | pancreatic beta | cells. For example, the Cell Titer-Glo luminescent cell viability assay measures the number of viable |
| | | | cells. | cells in culture based on quantitation of the ATP present which signals the presence of metabolically |
| | | | | active cells. Exemplary assays that may be used or routinely modified to test regulation of viability and |
| | | | | proliferation of pancreatic beta cells by polypeptides of the invention (including antibodies and agonists |
| | | | | or antagonists of the invention) include assays disclosed in: Ohtani KI, et al., Endocrinology, 139(1): 172-8 |
| | | | | (1998); Krautheim A, et al, Exp Clin Endocrinol Diabetes, 107 (1): 29-34 (1999), the contents of each |
| | | | | of which is herein incorporated by reference in its entirety. Pancreatic cells that may be used according |
| | | | | to these assays are publicly available (e.g., through the ATCC) and/or may be routinely generated. |
| | | | | Exemplary pancreatic cells that may be used according to these assays include HITT15 Cells. HITT15 |
| | | | | are an adherent epithelial cell line established from Syrian hamster islet cells transformed with SV40. |
| | | | | These cells express glucagon, somatostatin, and glucocorticoid receptors. The cells secrete insulin, |
| | | | | which is stimulated by glucose and glucagon and suppressed by somatostatin or glucocorticoids. ATTC# |
| | | | | CRL-1777 Refs: Lord and Ashcroft. Biochem. J. 219: 547-551; Santerre et al. Proc. Natl. Acad. Sci. |
| | | | | USA 78: 4339-4343, 1981. |
| 129 | HOFMQ33 | 428 | Activation of | Assays for the activation of transcription through the Serum Response Element (SRE) are well-known in |
| | | | transcription | the art and may be used or routinely modified to assess the ability of polypeptides of the invention |
| | | | through serum | (including antibodies and agonists or antagonists of the invention) to bind the serum response factor and |
| | | | response | modulate the expression of genes involved in growth and upregulate the function of growth-related genes |
| | | | element in | in many cell types. Exemplary assays for transcription through the SRE that may be used or routinely |
| | | | immune cells | modified to test SRE activity of the polypeptides of the invention (including antibodies and agonists or |
| | | | (such as T- | antagonists of the invention) include assays disclosed in Berger et al., Gene 66: 1-10 (1998); Cullen and |
| | | | cells). | Malm, Methods in Enzymol 216: 362-368 (1992); Henthorn et al., Proc Natl Acad Sci USA 85: 6342-6346 |
| | | | | (1988); Benson et al., J Immunol 153(9): 3862-3873 (1994); and Black et al., Virus Genes 12(2): 105-117 |
| | | | | (1997), the content of each of which are herein incorporated by reference in its entirety. T cells that may |
| | | | | be used according to these assays are publicly available (e.g., through the ATCC). Exemplary human T |
| | | | | cells, such as the MOLT4, that may be used according to these assays are publicly available (e.g., through |
| | | | | the ATCC). |
| 130 | HOFOC73 | 429 | Myoblast cell | Assays for muscle cell proliferation are well known in the art and may be used or routinely modified to |
| | | | proliferation | assess the ability of polypeptides of the invention (including antibodies and agonists or antagonists of the |
| | | | | invention) to stimulate or inhibit myoblast cell proliferation. Exemplary assays for myoblast cell |
| | | | | proliferation that may be used or routinely modified to test activity of polypeptides and antibodies of the |
| | | | | invention (including agonists or antagonists of the invention) include, for example, assays disclosed in: |
| | | | | Soeta, C., et al. “Possible role for the c-ski gene in the proliferation of myogenic cells in regenerating |
| | | | | skeletal muscles of rats” Dev Growth Differ Apr; 43(2): 155-64 (2001); Ewton DZ, et al., “IGF binding |
| | | | | proteins-4, -5 and -6 may play specialized roles during L6 myoblast proliferation and differentiation” J |
| | | | | Endocrinol Mar; 144(3): 539-53 (1995); and, Pampusch MS, et al., “Effect of transforming growth factor |
| | | | | beta on proliferation of L6 and embryonic porcine myogenic cells” J Cell Physiol Jun; 143(3): 524-8 |
| | | | | (1990); the contents of each of which are herein incorporated by reference in their entirety. Exemplary |
| | | | | myoblast cells that may be used according to these assays include the rat myoblast L6 cell line. Rat |
| | | | | myoblast L6 cells are an adherent rat myoblast cell line, isolated from primary cultures of rat thigh |
| | | | | muscle, that fuse to form multinucleated myotubes and striated fibers after culture in differentiation |
| | | | | media. |
| 131 | HOQBJ82 | 430 | Insulin | Assays for measuring secretion of insulin are well-known in the art and may be used or routinely |
| | | | Secretion | modified to assess the ability of polypeptides of the invention (including antibodies and agonists or |
| | | | | antagonists of the invention) to stimulate insulin secretion. For example, insulin secretion is measured by |
| | | | | FMAT using anti-rat insulin antibodies. Insulin secretion from pancreatic beta cells is upregulated by |
| | | | | glucose and also by certain proteins/peptides, and disregulation is a key component in diabetes. |
| | | | | Exemplary assays that may be used or routinely modified to test for stimulation of insulin secretion (from |
| | | | | pancreatic cells) by polypeptides of the invention (including antibodies and agonists or antagonists of the |
| | | | | invention) include assays disclosed in: Shimizu, H., et al., Endocr J, 47(3): 261-9 (2000); Salapatek, A. M., |
| | | | | et al., Mol Endocrinol, 13(8): 1305-17 (1999); Filipsson, K., et al., Ann N Y Acad Sci, 865: 441-4 |
| | | | | (1998); Olson, L. K., et al., J Biol Chem, 271(28): 16544-52 (1996); and, Miraglia S et. al., Journal of |
| | | | | Biomolecular Screening, 4: 193-204 (1999), the contents of each of which is herein incorporated by |
| | | | | reference in its entirety. Pancreatic cells that may be used according to these assays are publicly |
| | | | | available (e.g., through the ATCC) and/or may be routinely generated. Exemplary pancreatic cells that |
| | | | | may be used according to these assays include HITT15 Cells. HITT15 are an adherent epithelial cell line |
| | | | | established from Syrian hamster islet cells transformed with SV40. These cells express glucagon, |
| | | | | somatostatin, and glucocorticoid receptors. The cells secrete insulin, which is stimulated by glucose and |
| | | | | glucagon and suppressed by somatostatin or glucocorticoids. ATTC# CRL-1777 Refs: Lord and |
| | | | | Ashcroft. Biochem. J. 219: 547-551; Santerre et al. Proc. Natl. Acad. Sci. USA 78: 4339-4343, 1981. |
| 132 | HOSBY40 | 431 | Regulation of | Assays for the regulation of transcription through the FAS promoter element are well-known in the art |
| | | | transcription | and may be used or routinely modified to assess the ability of polypeptides of the invention (including |
| | | | through the FAS | antibodies and agonists or antagonists of the invention) to activate the FAS promoter element in a |
| | | | promoter | reporter construct and to regulate transcription of FAS, a key enzyme for lipogenesis. FAS promoter is |
| | | | element in | regulated by many transcription factors including SREBP. Insulin increases FAS gene transcription in |
| | | | hepatocytes | livers of diabetic mice. This stimulation of transcription is also somewhat glucose dependent. |
| | | | | Exemplary assays that may be used or routinely modified to test for FAS promoter element activity (in |
| | | | | hepatocytes) by polypeptides of the invention (including antibodies and agonists or antagonists of the |
| | | | | invention) include assays disclosed in Xiong, S., et al., Proc Natl Acad Sci U.S.A., 97(8): 3948-53 (2000); |
| | | | | Roder, K., et al., Eur J Biochem, 260(3): 743-51 (1999); Oskouian B, et al., Biochem J, 317 (Pt 1): 257-65 |
| | | | | (1996); Berger, et al., Gene 66: 1-10 (1988); and, Cullen, B., et al., Methods in Enzymol. 216: 362-368 |
| | | | | (1992), the contents of each of which is herein incorporated by reference in its entirety. Hepatocytes that |
| | | | | may be used according to these assays, such as H4IIE cells, are publicly available (e.g., through the |
| | | | | ATCC) and/or may be routinely generated. Exemplary hepatocytes that may be used according to these |
| | | | | assays include rat liver hepatoma cell line(s) inducible with glucocorticoids, insulin, or cAMP |
| | | | | derivatives. |
| 133 | HOSDJ25 | 432 | Production of | Assays for measuring expression of ICAM-1 are well-known in the art and may be used or routinely |
| | | | ICAM-1 | modified to assess the ability of polypeptides of the invention (including antibodies and agonists or |
| | | | | antagonists of the invention) to regulate ICAM-1 expression. Exemplary assays that may be used or |
| | | | | routinely modified to measure ICAM-1 expression include assays disclosed in: Rolfe BE, et al., |
| | | | | Atherosclerosis, 149(1): 99-110 (2000); Panettieri RA Jr, et al., J Immunol, 154(5): 2358-2365 (1995); |
| | | | | and, Grunstein MM, et al., Am J Physiol Lung Cell Mol Physiol, 278(6): L1154-L1163 (2000), the |
| | | | | contents of each of which is herein incorporated by reference in its entirety. Cells that may be used |
| | | | | according to these assays are publicly available (e.g., through the ATCC) and/or may be routinely |
| | | | | generated. Exemplary cells that may be used according to these assays include Aortic Smooth Muscle |
| | | | | Cells (AOSMC); such as bovine AOSMC. |
| 133 | HOSDJ25 | 432 | Regulation of | Caspase Apoptosis. Assays for caspase apoptosis are well known in the art and may be used or |
| | | | apoptosis in | routinely modified to assess the ability of polypeptides of the invention (including antibodies and |
| | | | pancreatic beta cells. | agonists or antagonists of the invention) to promote caspase protease-mediated apoptosis. Apoptosis in |
| | | | | pancreatic beta is associated with induction and progression of diabetes. Exemplary assays for caspase |
| | | | | apoptosis that may be used or routinely modified to test capase apoptosis activity of polypeptides of the |
| | | | | invention (including antibodies and agonists or antagonists of the invention) include the assays disclosed |
| | | | | in: Loweth, AC, et al., FEBS Lett, 400(3): 285-8 (1997); Saini, KS, et al., Biochem Mol Biol Int, |
| | | | | 39(6): 1229-36 (1996); Krautheim, A., et al., Br J Pharmacol, 129(4): 687-94 (2000); Chandra J, et al., |
| | | | | Diabetes, 50 Suppl 1: S44-7 (2001); Suk K, et al., J Immunol, 166(7): 4481-9 (2001); Tejedo J, et al., |
| | | | | FEBS Lett, 459(2): 238-43 (1999); Zhang, S., et al., FEBS Lett, 455(3): 315-20 (1999); Lee et al., FEBS |
| | | | | Lett 485(2-3): 122-126 (2000); Nor et al., J Vasc Res 37(3): 209-218 (2000); and Karsan and Harlan, J |
| | | | | Atheroscler Thromb 3(2): 75-80 (1996); the contents of each of which are herein incorporated by |
| | | | | reference in its entirety. Pancreatic cells that may be used according to these assays are publicly |
| | | | | available (e.g., through the ATCC) and/or may be routinely generated. Exemplary pancreatic cells that |
| | | | | may be used according to these assays include RIN-m. RIN-m is a rat adherent pancreatic beta cell |
| | | | | insulinoma cell line derived from a radiation induced transplantable rat islet cell tumor. The cells |
| | | | | produce and secrete islet polypeptide hormones, and produce insulin, somatostatin, and possibly |
| | | | | glucagon. ATTC: #CRL-2057 Chick et al. Proc. Natl. Acad. Sci. 1977 74: 628; AF et al. Proc. Natl. Acad. Sci. |
| | | | | 1980 77: 3519. |
| 133 | HOSDJ25 | 432 | Activation of | Assays for the activation of transcription through the Nuclear Factor of Activated T cells (NFAT) |
| | | | transcription | response element are well-known in the art and may be used or routinely modified to assess the ability of |
| | | | through NFAT | polypeptides of the invention (including antibodies and agonists or antagonists of the invention) to |
| | | | response | regulate NFAT transcription factors and modulate expression of genes involved in immunomodulatory |
| | | | element in | functions. Exemplary assays for transcription through the NFAT response element that may be used or |
| | | | immune cells | routinely modified to test NFAT-response element activity of polypeptides of the invention (including |
| | | | (such as natural | antibodies and agonists or antagonists of the invention) include assays disclosed in Berger et al., Gene |
| | | | killer cells). | 66: 1-10 (1998); Cullen and Malm, Methods in Enzymol 216: 362-368 (1992); Henthorn et al., Proc Natl |
| | | | | Acad Sci USA 85: 6342-6346 (1988); Aramburu et al., J Exp Med 182(3): 801-810 (1995); De Boer et al., |
| | | | | Int J Biochem Cell Biol 31(10): 1221-1236 (1999); Fraser et al., Eur J Immunol 29(3): 838-844 (1999); |
| | | | | and Yeseen et al., J Biol Chem 268(19): 14285-14293 (1993), the contents of each of which are herein |
| | | | | incorporated by reference in its entirety. NK cells that may be used according to these assays are |
| | | | | publicly available (e.g., through the ATCC). Exemplary human NK cells that may be used according to |
| | | | | these assays include the NK-YT cell line, which is a human natural killer cell line with cytolytic and cytotoxic |
| | | | | activity. |
| 134 | HPEAD79 | 433 | Regulation of | Assays for the regulation of transcription through the DMEF1 response element are well-known in the art |
| | | | transcription via | and may be used or routinely modified to assess the ability of polypeptides of the invention (including |
| | | | DMEF1 | antibodies and agonists or antagonists of the invention) to activate the DMEF1 response element in a |
| | | | response | reporter construct (such as that containing the GLUT4 promoter) and to regulate insulin production. The |
| | | | element in | DMEF1 response element is present in the GLUT4 promoter and binds to MEF2 transcription factor and |
| | | | adipocytes and | another transcription factor that is required for insulin regulation of Glut4 expression in skeletal muscle. |
| | | | pre-adipocytes | GLUT4 is the primary insulin-responsive glucose transporter in fat and muscle tissue. Exemplary assays |
| | | | | that may be used or routinely modified to test for DMEF1 response element activity (in adipocytes and |
| | | | | pre-adipocytes) by polypeptides of the invention (including antibodies and agonists or antagonists of the |
| | | | | invention) include assays disclosed inThai, M. V., et al., J Biol Chem, 273(23): 14285-92 (1998); Mora, S., |
| | | | | et al., J Biol Chem, 275(21): 16323-8 (2000); Liu, M. L., et al., J Biol Chem, 269(45): 28514-21 (1994); |
| | | | | “Identification of a 30-base pair regulatory element and novel DNA binding protein that regulates the |
| | | | | human GLUT4 promoter in transgenic mice”, J Biol Chem. 2000 Aug 4; 275(31): 23666-73; Berger, et al., |
| | | | | Gene 66: 1-10 (1988); and, Cullen, B., et al., Methods in Enzymol. 216: 362-368 (1992), the contents of |
| | | | | each of which is herein incorporated by reference in its entirety. Adipocytes and pre-adipocytes that may |
| | | | | be used according to these assays are publicly available (e.g., through the ATCC) and/or may be |
| | | | | routinely generated. Exemplary cells that may be used according to these assays include the mouse 3T3- |
| | | | | L1 cell line which is an adherent mouse preadipocyte cell line. Mouse 3T3-L1 cells are a continuous |
| | | | | substrain of 3T3 fibroblasts developed through clonal isolation. These cells undergo a pre-adipocyte to |
| | | | | adipose-like conversion under appropriate differentiation culture conditions. |
| 135 | HPIBO15 | 434 | Regulation of | Assays for the regulation of viability and proliferation of cells in vitro are well-known in the art and may |
| | | | viability and | be used or routinely modified to assess the ability of polypeptides of the invention (including antibodies |
| | | | proliferation of | and agonists or antagonists of the invention) to regulate viability and proliferation of pancreatic beta |
| | | | pancreatic beta | cells. For example, the Cell Titer-Glo luminescent cell viability assay measures the number of viable |
| | | | cells. | cells in culture based on quantitation of the ATP present which signals the presence of metabolically |
| | | | | active cells. Exemplary assays that may be used or routinely modified to test regulation of viability and |
| | | | | proliferation of pancreatic beta cells by polypeptides of the invention (including antibodies and agonists |
| | | | | or antagonists of the invention) include assays disclosed in: Friedrichsen BN, et al., Mol Endocrinol, |
| | | | | 15(1): 136-48 (2001); Huotari MA, et al., Endocrinology, 139(4): 1494-9 (1998); Hugl SR, et al., J Biol |
| | | | | Chem 1998 Jul 10; 273(28): 17771-9 (1998), the contents of each of which is herein incorporated by |
| | | | | reference in its entirety. Pancreatic cells that may be used according to these assays are publicly |
| | | | | available (e.g., through the ATCC) and/or may be routinely generated. Exemplary pancreatic cells that |
| | | | | may be used according to these assays include rat INS-1 cells. INS-1 cells are a semi-adherent cell line |
| | | | | established from cells isolated from an X-ray induced rat transplantable insulinoma. These cells retain |
| | | | | characteristics typical of native pancreatic beta cells including glucose inducible insulin secretion. |
| | | | | References: Asfari et al. Endocrinology 1992 130: 167. |
| 135 | HPIBO15 | 434 | Production of | IL-6 FMAT. IL-6 is produced by T cells and has strong effects on B cells. IL-6 participates in IL-4 |
| | | | IL-6 | induced IgE production and increases IgA production (IgA plays a role in mucosal immunity). IL-6 |
| | | | | induces cytotoxic T cells. Deregulated expression of IL-6 has been linked to autoimmune disease, |
| | | | | plasmacytomas, myelomas, and chronic hyperproliferative diseases. Assays for immunomodulatory and |
| | | | | differentiation factor proteins produced by a large variety of cells where the expression level is strongly |
| | | | | regulated by cytokines, growth factors, and hormones are well known in the art and may be used or |
| | | | | routinely modified to assess the ability of polypeptides of the invention (including antibodies and |
| | | | | agonists or antagonists of the invention) to mediate immunomodulation and differentiation and modulate |
| | | | | T cell proliferation and function. Exemplary assays that test for immunomodulatory proteins evaluate the |
| | | | | production of cytokines, such as IL-6, and the stimulation and upregulation of T cell proliferation and |
| | | | | functional activities. Such assays that may be used or routinely modified to test immunomodulatory and |
| | | | | differentiation activity of polypeptides of the invention (including antibodies and agonists or antagonists |
| | | | | of the invention) include assays disclosed in Miraglia et al., J Biomolecular Screening 4: 193-204(1999); |
| | | | | Rowland et al., “Lymphocytes: a practical approach” Chapter 6: 138-160 (2000); and Verhasselt et al., J |
| | | | | Immunol 158: 2919-2925 (1997), the contents of each of which are herein incorporated by reference in its |
| | | | | entirety. Human dendritic cells that may be used according to these assays may be isolated using |
| | | | | techniques disclosed herein or otherwise known in the art. Human dendritic cells are antigen presenting |
| | | | | cells in suspension culture, which, when activated by antigen and/or cytokines, initiate and upregulate T |
| | | | | cell proliferation and functional activities. |
| 136 | HPJBI33 | 435 | Stimulation of | Assays for measuring secretion of insulin are well-known in the art and may be used or routinely |
| | | | insulin secretion | modified to assess the ability of polypeptides of the invention (including antibodies and agonists or |
| | | | from pancreatic | antagonists of the invention) to stimulate insulin secretion. For example, insulin secretion is measured by |
| | | | beta cells. | FMAT using anti-rat insulin antibodies. Insulin secretion from pancreatic beta cells is upregulated by |
| | | | | glucose and also by certain proteins/peptides, and disregulation is a key component in diabetes. |
| | | | | Exemplary assays that may be used or routinely modified to test for stimulation of insulin secretion (from |
| | | | | pancreatic cells) by polypeptides of the invention (including antibodies and agonists or antagonists of the |
| | | | | invention) include assays disclosed in: Ahren, B., et al., Am J Physiol, 277(4 Pt 2): R959-66 (1999); Li, M., |
| | | | | et al., Endocrinology, 138(9): 3735-40 (1997); Kim, K. H., et al., FEBS Lett, 377(2): 237-9 (1995); |
| | | | | and, Miraglia S et. al., Journal of Biomolecular Screening, 4: 193-204 (1999), the contents of each of |
| | | | | which is herein incorporated by reference in its entirety. Pancreatic cells that may be used according to |
| | | | | these assays are publicly available (e.g., through the ATCC) and/or may be routinely generated. |
| | | | | Exemplary pancreatic cells that may be used according to these assays include rat INS-1 cells. INS-1 |
| | | | | cells are a semi-adherent cell line established from cells isolated from an X-ray induced rat transplantable |
| | | | | insulinoma. These cells retain characteristics typical of native pancreatic beta cells including glucose |
| | | | | inducible insulin secretion. References: Asfari et al. Endocrinology 1992 130: 167. |
| 137 | HPJBK12 | 436 | Insulin | Assays for measuring secretion of insulin are well-known in the art and may be used or routinely |
| | | | Secretion | modified to assess the ability of polypeptides of the invention (including antibodies and agonists or |
| | | | | antagonists of the invention) to stimulate insulin secretion. For example, insulin secretion is measured by |
| | | | | FMAT using anti-rat insulin antibodies. Insulin secretion from pancreatic beta cells is upregulated by |
| | | | | glucose and also by certain proteins/peptides, and disregulation is a key component in diabetes. |
| | | | | Exemplary assays that may be used or routinely modified to test for stimulation of insulin secretion (from |
| | | | | pancreatic cells) by polypeptides of the invention (including antibodies and agonists or antagonists of the |
| | | | | invention) include assays disclosed in: Shimizu, H., et al., Endocr J, 47(3): 261-9 (2000); Salapatek, A. M., |
| | | | | et al., Mol Endocrinol, 13(8): 1305-17 (1999); Filipsson, K., et al., Ann N Y Acad Sci, 865: 441-4 |
| | | | | (1998); Olson, L. K., et al., J Biol Chem, 271(28): 16544-52 (1996); and, Miraglia S et. al., Journal of |
| | | | | Biomolecular Screening, 4: 193-204 (1999), the contents of each of which is herein incorporated by |
| | | | | reference in its entirety. Pancreatic cells that may be used according to these assays are publicly |
| | | | | available (e.g., through the ATCC) and/or may be routinely generated. Exemplary pancreatic cells that |
| | | | | may be used according to these assays include HITT15 Cells. HITT15 are an adherent epithelial cell line |
| | | | | established from Syrian hamster islet cells transformed with SV40. These cells express glucagon, |
| | | | | somatostatin, and glucocorticoid receptors. The cells secrete insulin, which is stimulated by glucose and |
| | | | | glucagon and suppressed by somatostatin or glucocorticoids. ATTC# CRL-1777 Refs: Lord and |
| | | | | Ashcroft. Biochem. J. 219: 547-551; Santerre et al., Proc. Natl. Acad. Sci. USA 78: 4339-4343, 1981. |
| 137 | HPJBK12 | 436 | Regulation of | Caspase Apoptosis. Assays for caspase apoptosis are well known in the art and may be used or routinely |
| | | | apoptosis of | modified to assess the ability of polypeptides of the invention (including antibodies and agonists or |
| | | | immune cells | antagonists of the invention) to regulate caspase protease-mediated apoptosis in immune cells (such as, |
| | | | (such as mast | for example, in mast cells). Mast cells are found in connective and mucosal tissues throughout the body, |
| | | | cells). | and their activation via immunoglobulin E-antigen, promoted by T helper cell type 2 cytokines, is an |
| | | | | important component of allergic disease. Dysregulation of mast cell apoptosis may play a role in allergic |
| | | | | disease and mast cell tumor survival. Exemplary assays for caspase apoptosis that may be used or |
| | | | | routinely modified to test capase apoptosis activity induced by polypeptides of the invention (including |
| | | | | antibodies and agonists or antagonists of the invention) include the assays disclosed in: Masuda A, et al., |
| | | | | J Biol Chem, 276(28): 26107-26113 (2001); Yeatman CF 2nd, et al., J Exp Med, 192(8): 1093-1103 |
| | | | | (2000); Lee et al., FEBS Lett 485(2-3): 122-126 (2000); Nor et al., J Vasc Res 37(3): 209-218 (2000); and |
| | | | | Karsan and Harlan, J Atheroscler Thromb 3(2): 75-80 (1996); the contents of each of which are herein |
| | | | | incorporated by reference in its entirety. Immune cells that may be used according to these assays are |
| | | | | publicly available (e.g., through commercial sources). Exemplary immune cells that may be used |
| | | | | according to these assays include mast cells such as the HMC human mast cell line. |
| 137 | HPJBK12 | 436 | Activation of | Kinase assay. JNK and p38 kinase assays for signal transduction that regulate cell proliferation, |
| | | | Endothelial Cell | activation, or apoptosis are well known in the art and may be used or routinely modified to assess the |
| | | | p38 or JNK | ability of polypeptides of the invention (including antibodies and agonists or antagonists of the invention) |
| | | | Signaling | to promote or inhibit cell proliferation, activation, and apoptosis. Exemplary assays for JNK and p38 |
| | | | Pathway. | kinase activity that may be used or routinely modified to test JNK and p38 kinase-induced activity of |
| | | | | polypeptides of the invention (including antibodies and agonists or antagonists of the invention) include |
| | | | | the assays disclosed in Forrer et al., Biol Chem 379(8-9): 1101-1110 (1998); Gupta et al., Exp Cell Res |
| | | | | 247(2): 495-504 (1999); Kyriakis JM, Biochem Soc Symp 64: 29-48 (1999); Chang and Karin, Nature |
| | | | | 410(6824): 37-40 (2001); and Cobb MH, Prog Biophys Mol Biol 71(3-4): 479-500 (1999); the contents of |
| | | | | each of which are herein incorporated by reference in its entirety. Endothelial cells that may be used |
| | | | | according to these assays are publicly available (e.g., through the ATCC). Exemplary endothelial cells |
| | | | | that may be used according to these assays include human umbilical vein endothelial cells (HUVEC), |
| | | | | which are endothelial cells which line venous blood vessels, and are involved in functions that include, |
| | | | | but are not limited to, angiogenesis, vascular permeability, vascular tone, and immune cell extravasation. |
| 138 | HPMDK28 | 437 | Stimulation of | Assays for measuring calcium flux are well-known in the art and may be used or routinely modified to |
| | | | Calcium Flux in | assess the ability of polypeptides of the invention (including antibodies and agonists or antagonists of the |
| | | | pancreatic beta | invention) to mobilize calcium. For example, the FLPR assay may be used to measure influx of calcium. |
| | | | cells. | Cells normally have very low concentrations of cytosolic calcium compared to much higher extracellular |
| | | | | calcium. Extracellular factors can cause an influx of calcium, leading to activation of calcium responsive |
| | | | | signaling pathways and alterations in cell functions. Exemplary assays that may be used or routinely |
| | | | | modified to measure calcium flux by polypeptides of the invention (including antibodies and agonists or |
| | | | | antagonists of the invention) include assays disclosed in: Satin LS, et al., Endocrinology, 136(10):4589-601 |
| | | | | (1995); Mogami H, et al., Endocrinology, 136(7): 2960-6 (1995); Richardson SB, et al., Biochem J, |
| | | | | 288 (Pt 3): 847-51 (1992); and, Meats, JE, et al., Cell Calcium 1989 Nov-Dec; 10(8): 535-41 (1989), the |
| | | | | contents of each of which is herein incorporated by reference in its entirety. Pancreatic cells that may be |
| | | | | used according to these assays are publicly available (e.g., through the ATCC) and/or may be routinely |
| | | | | generated. Exemplary pancreatic cells that may be used according to these assays include HITT15 Cells. |
| | | | | HITT15 are an adherent epithelial cell line established from Syrian hamster islet cells transformed with |
| | | | | SV40. These cells express glucagon, somatostatin, and glucocorticoid receptors. The cells secrete |
| | | | | insulin, which is stimulated by glucose and glucagon and suppressed by somatostatin or glucocorticoids. |
| | | | | ATTC# CRL-1777 Refs: Lord and Ashcroft. Biochem. J. 219: 547-551; Santerre et al. Proc. Natl. |
| | | | | Acad. Sci. USA 78: 4339-4343, 1981. |
| 139 | HPRAL78 | 438 | Regulation of | Assays for the regulation of transcription through the DMEF1 response element are well-known in the art |
| | | | transcription via | and may be used or routinely modified to assess the ability of polypeptides of the invention (including |
| | | | DMEF1 | antibodies and agonists or antagonists of the invention) to activate the DMEF1 response element in a |
| | | | response | reporter construct (such as that containing the GLUT4 promoter) and to regulate insulin production. The |
| | | | element in | DMEF1 response element is present in the GLUT4 promoter and binds to MEF2 transcription factor and |
| | | | adipocytes and | another transcription factor that is required for insulin regulation of Glut4 expression in skeletal muscle. |
| | | | pre-adipocytes | GLUT4 is the primary insulin-responsive glucose transporter in fat and muscle tissue. Exemplary assays |
| | | | | that may be used or routinely modified to test for DMEF1 response element activity (in adipocytes and |
| | | | | pre-adipocytes) by polypeptides of the invention (including antibodies and agonists or antagonists of the |
| | | | | invention) include assays disclosed inThai, M. V., et al., J Biol Chem, 273(23): 14285-92 (1998); Mora, S., |
| | | | | et al., J Biol Chem, 275(21): 16323-8 (2000); Liu, M. L., et al., J Biol Chem, 269(45): 28514-21 (1994); |
| | | | | “Identification of a 30-base pair regulatory element and novel DNA binding protein that regulates the |
| | | | | human GLUT4 promoter in transgenic mice”, J Biol Chem. 2000 Aug 4; 275(31): 23666-73; Berger, et al., |
| | | | | Gene 66: 1-10 (1988); and, Cullen, B., et al., Methods in Enzymol. 216: 362-368 (1992), the contents of |
| | | | | each of which is herein incorporated by reference in its entirety. Adipocytes and pre-adipocytes that may |
| | | | | be used according to these assays are publicly available (e.g., through the ATCC) and/or may be |
| | | | | routinely generated. Exemplary cells that may be used according to these assays include the mouse 3T3- |
| | | | | L1 cell line which is an adherent mouse preadipocyte cell line. Mouse 3T3-L1 cells are a continuous |
| | | | | substrain of 3T3 fibroblasts developed through clonal isolation. These cells undergo a pre-adipocyte to |
| | | | | adipose-like conversion under appropriate differentiation culture conditions. |
| 140 | HRABA80 | 439 | Insulin | Assays for measuring secretion of insulin are well-known in the art and may be used or routinely |
| | | | Secretion | modified to assess the ability of polypeptides of the invention (including antibodies and agonists or |
| | | | | antagonists of the invention) to stimulate insulin secretion. For example, insulin secretion is measured by |
| | | | | FMAT using anti-rat insulin antibodies. Insulin secretion from pancreatic beta cells is upregulated by |
| | | | | glucose and also by certain proteins/peptides, and disregulation is a key component in diabetes. |
| | | | | Exemplary assays that may be used or routinely modified to test for stimulation of insulin secretion (from |
| | | | | pancreatic cells) by polypeptides of the invention (including antibodies and agonists or antagonists of the |
| | | | | invention) include assays disclosed in: Shimizu, H., et al., Endocr J, 47(3): 261-9 (2000); Salapatek, A. M., |
| | | | | et al., Mol Endocrinol, 13(8): 1305-17 (1999); Filipsson, K., et al., Ann N Y Acad Sci, 865: 441-4 |
| | | | | (1998); Olson, L. K., et al., J Biol Chem, 271(28): 16544-52 (1996); and, Miraglia S et. al., Journal of |
| | | | | Biomolecular Screening, 4: 193-204 (1999), the contents of each of which is herein incorporated by |
| | | | | reference in its entirety. Pancreatic cells that may be used according to these assays are publicly |
| | | | | available (e.g., through the ATCC) and/or may be routinely generated. Exemplary pancreatic cells that |
| | | | | may be used according to these assays include HITT15 Cells. HITT15 are an adherent epithelial cell line |
| | | | | established from Syrian hamster islet cells transformed with SV40. These cells express glucagon, |
| | | | | somatostatin, and glucocorticoid receptors. The cells secrete insulin, which is stimulated by glucose and |
| | | | | glucagon and suppressed by somatostatin or glucocorticoids. ATTC# CRL-1777 Refs: Lord and |
| | | | | Ashcroft. Biochem. J. 219: 547-551; Santerre et al. Proc. Natl. Acad. Sci. USA 78: 4339-4343, 1981. |
| 140 | HRABA80 | 439 | Activation of | Kinase assay. Kinase assays, for example an Elk-1 kinase assay, for ERK signal transduction that |
| | | | Endothelial Cell | regulate cell proliferation or differentiation are well known in the art and may be used or routinely |
| | | | ERK Signaling | modified to assess the ability of polypeptides of the invention (including antibodies and agonists or |
| | | | Pathway. | antagonists of the invention) to promote or inhibit cell proliferation, activation, and differentiation. |
| | | | | Exemplary assays for ERK kinase activity that may be used or routinely modified to test ERK kinase- |
| | | | | induced activity of polypeptides of the invention (including antibodies and agonists or antagonists of the |
| | | | | invention) include the assays disclosed in Forrer et al., Biol Chem 379(8-9): 1101-1110 (1998); Berra et |
| | | | | al., Biochem Pharmacol 60(8): 1171-1178 (2000); Gupta et al., Exp Cell Res 247(2): 495-504 (1999); |
| | | | | Chang and Karin, Nature 410(6824): 37-40 (2001); and Cobb MH, Prog Biophys Mol Biol 71(3-4): 479-500 |
| | | | | (1999); the contents of each of which are herein incorporated by reference in its entirety. Endothelial |
| | | | | cells that may be used according to these assays are publicly available (e.g., through the ATCC). |
| | | | | Exemplary endothelial cells that may be used according to these assays include human umbilical vein |
| | | | | endothelial cells (HUVEC), which are endothelial cells which line venous blood vessels, and are involved |
| | | | | in functions that include, but are not limited to, angiogenesis, vascular permeability, vascular tone, and |
| | | | | immune cell extravasation. |
| 140 | HRABA80 | 439 | Upregulation of | CD152 FMAT. CD152 (a.k.a. CTLA-4) expression is restricted to activated T cells. CD152 is a |
| | | | CD152 and | negative regulator of T cell proliferation. Reduced CD152 expression has been linked to |
| | | | activation of T | hyperproliferative and autoimmune diseases. Overexpression of CD152 may lead to impaired |
| | | | cells | immunoresponses. Assays for immunomodulatory proteins important in the maintenance of T cell |
| | | | | homeostasis and expressed almost exclusively on CD4+ and CD8+ T cells are well known in the art and |
| | | | | may be used or routinely modified to assess the ability of polypeptides of the invention (including |
| | | | | antibodies and agonists or antagonists of the invention) to modulate the activation of T cells, maintain T |
| | | | | cell homeostasis, and/or mediate humoral or cell-mediated immunity. Exemplary assays that test for |
| | | | | immunomodulatory proteins evaluate the upregulation of cell surface markers, such as CD152, and the |
| | | | | activation of T cells. Such assays that may be used or routinely modified to test immunomodulatory |
| | | | | activity of polypeptides of the invention (including antibodies and agonists or antagonists of the |
| | | | | invention) include, for example, the assays disclosed in Miraglia et al., J Biomolecular Screening 4: 193-204 |
| | | | | (1999); Rowland et al., “Lymphocytes: a practical approach” Chapter 6: 138-160 (2000); McCoy et |
| | | | | al., Immunol Cell Biol 77(1): 1-10 (1999); Oostervegal et al., Curr Opin Immunol 11(3): 294-300(1999); |
| | | | | and Saito T, Curr Opin Immunol 10(3): 313-321 (1998), the contents of each of which are herein |
| | | | | incorporated by reference in its entirety. Human T cells that may be used according to these assays may |
| | | | | be isolated using techniques disclosed herein or otherwise known in the art. Human T cells are primary |
| | | | | human lymphocytes that mature in the thymus and express a T Cell receptor and CD3, CD4, or CD8. |
| | | | | These cells mediate humoral or cell-mediated immunity and may be preactivated to enhance |
| | | | | responsiveness to immunomodulatory factors. |
| 141 | HRACD15 | 440 | Regulation of | Assays for the regulation of transcription of Malic Enzyme are well-known in the art and may be used or |
| | | | transcription of | routinely modified to assess the ability of polypeptides of the invention (including antibodies and |
| | | | Malic Enzyme | agonists or antagonists of the invention) to regulate transcription of Malic Enzyme, a key enzyme in |
| | | | in hepatocytes | lipogenesis. Malic enzyme is involved in lipogenesisand its expression is stimulted by insulin. ME |
| | | | | promoter contains two direct repeat (DR1)-like elements MEp and MEd identified as putative PPAR |
| | | | | response elements. ME promoter may also responds to AP1 and other transcription factors. Exemplary |
| | | | | assays that may be used or routinely modified to test for regulation of transcription of Malic Enzyme (in |
| | | | | hepatocytes) by polypeptides of the invention (including antibodies and agonists or antagonists of the |
| | | | | invention) include assays disclosed in: Streeper, R. S., et al., Mol Endocrinol, 12(11): 1778-91 (1998); |
| | | | | Garcia-Jimenez, C., et al., Mol Endocrinol, 8(10): 1361-9 (1994); Barroso, I., et al., J Biol Chem, |
| | | | | 274(25): 17997-8004 (1999); Ijpenberg, A., et al., J Biol Chem, 272(32): 20108-20117 (1997); Berger, et |
| | | | | al., Gene 66: 1-10 (1988); and, Cullen, B., et al., Methods in Enzymol. 216: 362-368 (1992), the contents |
| | | | | of each of which is herein incorporated by reference in its entirety. Hepatocytes that may be used |
| | | | | according to these assays are publicly available (e.g., through the ATCC) and/or may be routinely |
| | | | | generated. Exemplary hepatocytes that may be used according to these assays includes the mouse 3T3- |
| | | | | L1 cell line. 3T3-L1 is a mouse preadipocyte cell line (adherent). It is a continuous substrain of 3T3 |
| | | | | fibroblasts developed through clonal isolation. Cells undergo a pre-adipocyte to adipose-like conversion |
| | | | | under appropriate differentiation culture conditions. |
| 141 | HRACD15 | 440 | Activation of T- | Kinase assay. JNK and p38 kinase assays for signal transduction that regulate cell proliferation, |
| | | | Cell p38 or JNK | activation, or apoptosis are well known in the art and may be used or routinely modified to assess the |
| | | | Signaling | ability of polypeptides of the invention (including antibodies and agonists or antagonists of the invention) |
| | | | Pathway. | to promote or inhibit immune cell (e.g. T-cell) proliferation, activation, and apoptosis. Exemplary assays |
| | | | | for JNK and p38 kinase activity that may be used or routinely modified to test JNK and p38 kinase- |
| | | | | induced activity of polypeptides of the invention (including antibodies and agonists or antagonists of the |
| | | | | invention) include the assays disclosed in Forrer et al., Biol Chem 379(8-9): 1101-1110 (1998); Gupta et |
| | | | | al., Exp Cell Res 247(2): 495-504 (1999); Kyriakis JM, Biochem Soc Symp 64: 29-48 (1999); Chang and |
| | | | | Karin, Nature 410(6824): 37-40 (2001); and Cobb MH, Prog Biophys Mol Biol 71(3-4): 479-500 (1999); |
| | | | | the contents of each of which are herein incorporated by reference in its entirety. T cells that may be |
| | | | | used according to these assays are publicly available (e.g., through the ATCC). Exemplary mouse T cells |
| | | | | that may be used according to these assays include the CTLL cell line, which is an IL-2 dependent |
| | | | | suspension-culture cell line with cytotoxic activity. |
| 141 | HRACD15 | 440 | Regulation of | Caspase Apoptosis. Assays for caspase apoptosis are well known in the art and may be used or routinely |
| | | | apoptosis of | modified to assess the ability of polypeptides of the invention (including antibodies and agonists or |
| | | | immune cells | antagonists of the invention) to regulate caspase protease-mediated apoptosis in immune cells (such as, |
| | | | (such as mast | for example, in mast cells). Mast cells are found in connective and mucosal tissues throughout the body, |
| | | | cells). | and their activation via immunoglobulin E-antigen, promoted by T helper cell type 2 cytokines, is an |
| | | | | important component of allergic disease. Dysregulation of mast cell apoptosis may play a role in allergic |
| | | | | disease and mast cell tumor survival. Exemplary assays for caspase apoptosis that may be used or |
| | | | | routinely modified to test capase apoptosis activity induced by polypeptides of the invention (including |
| | | | | antibodies and agonists or antagonists of the invention) include the assays disclosed in: Masuda A, et al., |
| | | | | J Biol Chem, 276(28): 26107-26113 (2001); Yeatman CF 2nd, et al., J Exp Med, 192(8): 1093-1103 |
| | | | | (2000); Lee et al., FEBS Lett 485(2-3): 122-126 (2000); Nor et al., J Vasc Res 37(3): 209-218 (2000); and |
| | | | | Karsan and Harlan, J Atheroscler Thromb 3(2): 75-80 (1996); the contents of each of which are herein |
| | | | | incorporated by reference in its entirety. Immune cells that may be used according to these assays are |
| | | | | publicly available (e.g., through commercial sources). Exemplary immune cells that may be used |
| | | | | according to these assays include mast cells such as the HMC human mast cell line. |
| 142 | HRACJ35 | 441 | Regulation of | Assays for the regulation of transcription of Malic Enzyme are well-known in the art and may be used or |
| | | | transcription of | routinely modified to assess the ability of polypeptides of the invention (including antibodies and |
| | | | Malic Enzyme | agonists or antagonists of the invention) to regulate transcription of Malic Enzyme, a key enzyme in |
| | | | in hepatocytes | lipogenesis. Malic enzyme is involved in lipogenesisand its expression is stimulted by insulin. ME |
| | | | | promoter contains two direct repeat (DR1)—like elements MEp and MEd identified as putative PPAR |
| | | | | response elements. ME promoter may also responds to AP1 and other transcription factors. Exemplary |
| | | | | assays that may be used or routinely modified to test for regulation of transcription of Malic Enzyme (in |
| | | | | hepatocytes) by polypeptides of the invention (including antibodies and agonists or antagonists of the |
| | | | | invention) include assays disclosed in: Streeper, R. S., et al, Mol Endocrinol, 12(11): 1778-91 (1998); |
| | | | | Garcia-Jimenez, C., et al., Mol Endocrinol, 8(10): 1361-9 (1994); Barroso, I., et al., J Biol Chem, |
| | | | | 274(25): 17997-8004 (1999); Ijpenberg, A., et al., J Biol Chem, 272(32): 20108-20117 (1997); Berger, et |
| | | | | al., Gene 66: 1-10 (1988); and, Cullen, B., et al., Methods in Enzymol. 216: 362-368 (1992), the contents |
| | | | | of each of which is herein incorporated by reference in its entirety. Hepatocytes that may be used |
| | | | | according to these assays are publicly available (e.g., through the ATCC) and/or may be routinely |
| | | | | generated. Exemplary hepatocytes that may be used according to these assays includes the mouse 3T3- |
| | | | | L1 cell line. 3T3-L1 is a mouse preadipocyte cell line (adherent). It is a continuous substrain of 3T3 |
| | | | | fibroblasts developed through clonal isolation. Cells undergo a pre-adipocyte to adipose-like conversion |
| | | | | under appropriate differentiation culture conditions. |
| 142 | HRACJ35 | 441 | Production of | Assays for measuring expression of VCAM are well-known in the art and may be used or routinely |
| | | | VCAM in | modified to assess the ability of polypeptides of the invention (including antibodies and agonists or |
| | | | endothelial cells | antagonists of the invention) to regulate VCAM expression. For example, FMAT may be used to meaure |
| | | | (such as human | the upregulation of cell surface VCAM-1 expresssion in endothelial cells. Endothelial cells are cells that |
| | | | umbilical vein | line blood vessels, and are involved in functions that include, but are not limited to, angiogenesis, |
| | | | endothelial cells | vascular permeability, vascular tone, and immune cell extravasation. Exemplary endothelial cells that |
| | | | (HUVEC)) | may be used according to these assays include human umbilical vein endothelial cells (HUVEC), which |
| | | | | are available from commercial sources. The expression of VCAM (CD106), a membrane-associated |
| | | | | protein, can be upregulated by cytokines or other factors, and contributes to the extravasation of |
| | | | | lymphocytes, leucocytes and other immune cells from blood vessels; thus VCAM expression plays a role |
| | | | | in promoting immune and inflammatory responses. |
| 143 | HRGBL78 | 442 | Stimulation of | Assays for measuring secretion of insulin are well-known in the art and may be used or routinely |
| | | | insulin secretion | modified to assess the ability of polypeptides of the invention (including antibodies and agonists or |
| | | | from pancreatic | antagonists of the invention) to stimulate insulin secretion. For example, insulin secretion is measured by |
| | | | beta cells. | FMAT using anti-rat insulin antibodies. Insulin secretion from pancreatic beta cells is upregulated by |
| | | | | glucose and also by certain proteins/peptides, and disregulation is a key component in diabetes. |
| | | | | Exemplary assays that may be used or routinely modified to test for stimulation of insulin secretion (from |
| | | | | pancreatic cells) by polypeptides of the invention (including antibodies and agonists or antagonists of the |
| | | | | invention) include assays disclosed in: Ahren, B., et al., Am J Physiol, 277(4 Pt 2): R959-66 (1999); Li, M., |
| | | | | et al., Endocrinology, 138(9): 3735-40 (1997); Kim, K. H., et al., FEBS Lett, 377(2): 237-9 (1995); |
| | | | | and, Miraglia S et. al., Journal of Biomolecular Screening, 4: 193-204 (1999), the contents of each of |
| | | | | which is herein incorporated by reference in its entirety. Pancreatic cells that may be used according to |
| | | | | these assays are publicly available (e.g., through the ATCC) and/or may be routinely generated. |
| | | | | Exemplary pancreatic cells that may be used according to these assays include rat INS-1 cells. INS-1 |
| | | | | cells are a semi-adherent cell line established from cells isolated from an X-ray induced rat transplantable |
| | | | | insulinoma. These cells retain characteristics typical of native pancreatic beta cells including glucose |
| 144 | HROAJ39 | 443 | Stimulation of | Assays for measuring calcium flux are well-known in the art and may be used or routinely modified to |
| | | | Calcium Flux in | assess the ability of polypeptides of the invention (including antibodies and agonists or antagonists of the |
| | | | pancreatic beta | invention) to mobilize calcium. For example, the FLPR assay may be used to measure influx of calcium. |
| | | | cells. | Cells normally have very low concentrations of cytosolic calcium compared to much higher extracellular |
| | | | | calcium. Extracellular factors can cause an influx of calcium, leading to activation of calcium responsive |
| | | | | signaling pathways and alterations in cell functions. Exemplary assays that may be used or routinely |
| | | | | modified to measure calcium flux by polypeptides of the invention (including antibodies and agonists or |
| | | | | antagonists of the invention) include assays disclosed in: Satin LS, et al., Endocrinology, 136(10): 4589-601 |
| | | | | (1995); Mogami H, et al., Endocrinology, 136(7): 2960-6 (1995); Richardson SB, et al., Biochem J, |
| | | | | 288 (Pt 3): 847-51 (1992); and, Meats, JE, et al., Cell Calcium 1989 Nov-Dec; 10(8): 535-41 (1989), the |
| | | | | contents of each of which is herein incorporated by reference in its entirety. Pancreatic cells that may be |
| | | | | used according to these assays are publicly available (e.g., through the ATCC) and/or may be routinely |
| | | | | generated. Exemplary pancreatic cells that may be used according to these assays include HITT15 Cells. |
| | | | | HITT15 are an adherent epithelial cell line established from Syrian hamster islet cells transformed with |
| | | | | SV40. These cells express glucagon, somatostatin, and glucocorticoid receptors. The cells secrete |
| | | | | insulin, which is stimulated by glucose and glucagon and suppressed by somatostatin or glucocorticoids. |
| | | | | ATTC# CRL-1777 Refs: Lord and Ashcroft. Biochem. J. 219: 547-551; Santerre et al. Proc. Natl. |
| | | | | Acad. Sci. USA 78: 4339-4343, 1981. |
| 145 | HROBD68 | 444 | Regulation of | Caspase Apoptosis. Assays for caspase apoptosis are well known in the art and may be used or |
| | | | apoptosis in | routinely modified to assess the ability of polypeptides of the invention (including antibodies and |
| | | | pancreatic beta | agonists or antagonists of the invention) to promote caspase protease-mediated apoptosis. Apoptosis in |
| | | | cells. | pancreatic beta is associated with induction and progression of diabetes. Exemplary assays for caspase |
| | | | | apoptosis that may be used or routinely modified to test capase apoptosis activity of polypeptides of the |
| | | | | invention (including antibodies and agonists or antagonists of the invention) include the assays disclosed |
| | | | | in: Loweth, AC, et al., FEBS Lett, 400(3): 285-8 (1997); Saini, KS, et al., Biochem Mol Biol Int, |
| | | | | 39(6): 1229-36 (1996); Krautheim, A., et al., Br J Pharmacol, 129(4): 687-94 (2000); Chandra J, et al., |
| | | | | Diabetes, 50 Suppl 1: S44-7 (2001); Suk K, et al., J Immunol, 166(7): 4481-9 (2001); Tejedo J, et al., |
| | | | | FEBS Lett, 459(2): 238-43 (1999); Zhang, S., et al., FEBS Lett, 455(3): 315-20 (1999); Lee et al., FEBS |
| | | | | Lett 485(2-3): 122-126 (2000); Nor et al., J Vasc Res 37(3): 209-218 (2000); and Karsan and Harlan, J |
| | | | | Atheroscler Thromb 3(2): 75-80 (1996); the contents of each of which are herein incorporated by |
| | | | | reference in its entirety. Pancreatic cells that may be used according to these assays are publicly |
| | | | | available (e.g., through the ATCC) and/or may be routinely generated. Exemplary pancreatic cells that |
| | | | | may be used according to these assays include RIN-m. RIN-m is a rat adherent pancreatic beta cell |
| | | | | insulinoma cell line derived from a radiation induced transplantable rat islet cell tumor. The cells |
| | | | | produce and secrete islet polypeptide hormones, and produce insulin, somatostatin, and possibly |
| | | | | glucagon. ATTC: #CRL-2057 Chick et al. Proc. Natl. Acad. Sci. 1977 74: 628; AF et al. Proc. Natl. |
| | | | | Acad. Sci. 1980 77: 3519. |
| 146 | HSAWD74 | 445 | Regulation of | Assays for the regulation of transcription through the DMEF1 response element are well-known in the art |
| | | | transcription via | and may be used or routinely modified to assess the ability of polypeptides of the invention (including |
| | | | DMEF1 | antibodies and agonists or antagonists of the invention) to activate the DMEF1 response element in a |
| | | | response | reporter construct (such as that containing the GLUT4 promoter) and to regulate insulin production. The |
| | | | element in | DMEF1 response element is present in the GLUT4 promoter and binds to MEF2 transcription factor and |
| | | | adipocytes and | another transcription factor that is required for insulin regulation of Glut4 expression in skeletal muscle. |
| | | | pre-adipocytes | GLUT4 is the primary insulin-responsive glucose transporter in fat and muscle tissue. Exemplary assays |
| | | | | that may be used or routinely modified to test for DMEF1 response element activity (in adipocytes and |
| | | | | pre-adipocytes) by polypeptides of the invention (including antibodies and agonists or antagonists of the |
| | | | | invention) include assays disclosed inThai, M. V., et al., J Biol Chem, 273(23): 14285-92 (1998); Mora, S., |
| | | | | et al., J Biol Chem, 275(21): 16323-8 (2000); Liu, M. L., et al., J Biol Chem, 269(45): 28514-21 (1994); |
| | | | | “Identification of a 30-base pair regulatory element and novel DNA binding protein that regulates the |
| | | | | human GLUT4 promoter in transgenic mice”, J Biol Chem. 2000 Aug 4; 275(31): 23666-73; Berger, et al., |
| | | | | Gene 66: 1-10 (1988); and, Cullen, B., et al., Methods in Enzymol. 216: 362-368 (1992), the contents of |
| | | | | each of which is herein incorporated by reference in its entirety. Adipocytes and pre-adipocytes that may |
| | | | | be used according to these assays are publicly available (e.g., through the ATCC) and/or may be |
| | | | | routinely generated. Exemplary cells that may be used according to these assays include the mouse 3T3- |
| | | | | L1 cell line which is an adherent mouse preadipocyte cell line. Mouse 3T3-L1 cells are a continuous |
| | | | | substrain of 3T3 fibroblasts developed through clonal isolation. These cells undergo a pre-adipocyte to |
| | | | | adipose-like conversion under appropriate differentiation culture conditions. |
| 146 | HSAWD74 | 445 | Activation of | This reporter assay measures activation of the NFAT signaling pathway in HMC-1 human mast cell line. |
| | | | transcription | Activation of NFAT in mast cells has been linked to cytokine and chemokine production. Assays for the |
| | | | through NFAT | activation of transcription through the Nuclear Factor of Activated T cells (NFAT) response element are |
| | | | response | well-known in the art and may be used or routinely modified to assess the ability of polypeptides of the |
| | | | element in | invention (including antibodies and agonists or antagonists of the invention) to regulate NFAT |
| | | | immune cells | transcription factors and modulate expression of genes involved in immunomodulatory functions. |
| | | | (such as mast | Exemplary assays for transcription through the NFAT response element that may be used or routinely |
| | | | cells). | modified to test NFAT-response element activity of polypeptides of the invention (including antibodies |
| | | | | and agonists or antagonists of the invention) include assays disclosed in Berger et al., Gene 66: 1-10 |
| | | | | (1998); Cullen and Malm, Methods in Enzymol 216: 362-368 (1992); Henthorn et al., Proc Natl Acad Sci |
| | | | | USA 85: 6342-6346 (1988); De Boer et al., Int J Biochem Cell Biol 31(10): 1221-1236 (1999); Ali et al., J |
| | | | | Immunol 165(12): 7215-7223 (2000); Hutchinson and McCloskey, J Biol Chem 270(27): 16333-16338 |
| | | | | (1995), and Turner et al., J Exp Med 188: 527-537 (1998), the contents of each of which are herein |
| | | | | incorporated by reference in its entirety. Mast cells that may be used according to these assays are |
| | | | | publicly available (e.g., through the ATCC). Exemplary human mast cells that may be used according to |
| | | | | these assays include the HMC-1 cell line, which is an immature human mast cell line established from |
| | | | | the peripheral blood of a patient with mast cell leukemia, and exhibits many characteristics of immature |
| | | | | mast cells. |
| 147 | HSDEK49 | 446 | Activation of | Assays for the activation of transcription through the Serum Response Element (SRE) are well-known in |
| | | | transcription | the art and may be used or routinely modified to assess the ability of polypeptides of the invention |
| | | | through serum | (including antibodies and agonists or antagonists of the invention) to regulate the serum response factors |
| | | | response | and modulate the expression of genes involved in growth. Exemplary assays for transcription through |
| | | | element in | the SRE that may be used or routinely modified to test SRE activity of the polypeptides of the invention |
| | | | immune cells | (including antibodies and agonists or antagonists of the invention) include assays disclosed in Berger et |
| | | | (such as T- | al., Gene 66: 1-10 (1998); Cullen and Malm, Methods in Enzymol 216: 362-368 (1992); Henthorn et al., |
| | | | cells). | Proc Natl Acad Sci USA 85: 6342-6346 (1988); and Black et al., Virus Genes 12(2): 105-117 (1997), the |
| | | | | content of each of which are herein incorporated by reference in its entirety. T cells that may be used |
| | | | | according to these assays are publicly available (e.g., through the ATCC). Exemplary mouse T cells that |
| | | | | may be used according to these assays include the CTLL cell line, which is an IL-2 dependent suspension |
| | | | | culture of T cells with cytotoxic activity. |
| 147 | HSDEK49 | 446 | Regulation of | Assays for the regulation of transcription of Malic Enzyme are well-known in the art and may be used or |
| | | | transcription of | routinely modified to assess the ability of polypeptides of the invention (including antibodies and |
| | | | Malic Enzyme | agonists or antagonists of the invention) to regulate transcription of Malic Enzyme, a key enzyme in |
| | | | in adipocytes | lipogenesis. Malic enzyme is involved in lipogenesisand its expression is stimulted by insulin. ME |
| | | | | promoter contains two direct repeat (DR1)—like elements MEp and MEd identified as putative PPAR |
| | | | | response elements. ME promoter may also responds to AP1 and other transcription factors. Exemplary |
| | | | | assays that may be used or routinely modified to test for regulation of transcription of Malic Enzyme (in |
| | | | | adipoocytes) by polypeptides of the invention (including antibodies and agonists or antagonists of the |
| | | | | invention) include assays disclosed in: Streeper, R. S., et al., Mol Endocrinol, 12(11): 1778-91 (1998); |
| | | | | Garcia-Jimenez, C., et al., Mol Endocrinol, 8(10): 1361-9 (1994); Barroso, I., et al., J Biol Chem, |
| | | | | 274(25): 17997-8004 (1999); Ijpenberg, A., et al., J Biol Chem, 272(32): 20108-20117 (1997); Berger, et |
| | | | | al., Gene 66: 1-10 (1988); and, Cullen, B., et al., Methods in Enzymol. 216: 362-368 (1992), the contents |
| | | | | of each of which is herein incorporated by reference in its entirety. Hepatocytes that may be used |
| | | | | according to these assays are publicly available (e.g., through the ATCC) and/or may be routinely |
| | | | | generated. Exemplary hepatocytes that may be used according to these assays includes the H4IIE rat |
| | | | | liver hepatoma cell line. |
| 148 | HSDFJ26 | 447 | Regulation of | Assays for the regulation of transcription through the PEPCK promoter are well-known in the art and |
| | | | transcription | may be used or routinely modified to assess the ability of polypeptides of the invention (including |
| | | | through the | antibodies and agonists or antagonists of the invention) to activate the PEPCK promoter in a reporter |
| | | | PEPCK | construct and regulate liver gluconeogenesis. Exemplary assays for regulation of transcription through |
| | | | promoter in | the PEPCK promoter that may be used or routinely modified to test for PEPCK promoter activity (in |
| | | | hepatocytes | hepatocytes) of polypeptides of the invention (including antibodies and agonists or antagonists of the |
| | | | | invention) include assays disclosed in Berger et al., Gene 66: 1-10 (1998); Cullen and Malm, Methods in |
| | | | | Enzymol 216: 362-368 (1992); Henthorn et al., Proc Natl Acad Sci USA 85: 6342-6346 (1988); Lochhead |
| | | | | et al., Diabetes 49(6): 896-903 (2000); and Yeagley et al., J Biol Chem 275(23): 17814-17820 (2000), the |
| | | | | contents of each of which is herein incorporated by reference in its entirety. Hepatocyte cells that may be |
| | | | | used according to these assays are publicly available (e.g., through the ATCC) and/or may be routinely |
| | | | | generated. Exemplary liver hepatoma cells that may be used according to these assays include H4lle |
| | | | | cells, which contain a tyrosine amino transferase that is inducible with glucocorticoids, insulin, or cAMP |
| | | | | derivatives. |
| 149 | HSDSB09 | 448 | Regulation of | Assays for the regulation of transcription through the DMEF1 response element are well-known in the art |
| | | | transcription via | and may be used or routinely modified to assess the ability of polypeptides of the invention (including |
| | | | DMEF1 | antibodies and agonists or antagonists of the invention) to activate the DMEF1 response element in a |
| | | | response | reporter construct (such as that containing the GLUT4 promoter) and to regulate insulin production. The |
| | | | element in | DMEF1 response element is present in the GLUT4 promoter and binds to MEF2 transcription factor and |
| | | | adipocytes and | another transcription factor that is required for insulin regulation of Glut4 expression in skeletal muscle. |
| | | | pre-adipocytes | GLUT4 is the primary insulin-responsive glucose transporter in fat and muscle tissue. Exemplary assays |
| | | | | that may be used or routinely modified to test for DMEF1 response element activity (in adipocytes and |
| | | | | pre-adipocytes) by polypeptides of the invention (including antibodies and agonists or antagonists of the |
| | | | | invention) include assays disclosed inThai, M. V., et al., J Biol Chem, 273(23): 14285-92 (1998); Mora, S., |
| | | | | et al., J Biol Chem, 275(21): 16323-8 (2000); Liu, M. L., et al., J Biol Chem, 269(45): 28514-21 (1994); |
| | | | | “Identification of a 30-base pair regulatory element and novel DNA binding protein that regulates the |
| | | | | human GLUT4 promoter in transgenic mice”, J Biol Chem. 2000 Aug 4; 275(31): 23666-73; Berger, et al., |
| | | | | Gene 66: 1-10 (1988); and, Cullen, B., et al., Methods in Enzymol. 216: 362-368 (1992), the contents of |
| | | | | each of which is herein incorporated by reference in its entirety. Adipocytes and pre-adipocytes that may |
| | | | | be used according to these assays are publicly available (e.g., through the ATCC) and/or may be |
| | | | | routinely generated. Exemplary cells that may be used according to these assays include the mouse 3T3- |
| | | | | L1 cell line which is an adherent mouse preadipocyte cell line. Mouse 3T3-L1 cells are a continuous |
| | | | | substrain of 3T3 fibroblasts developed through clonal isolation. These cells undergo a pre-adipocyte to |
| | | | | adipose-like conversion under appropriate differentiation culture conditions. |
| 149 | HSDSB09 | 448 | Activation of | Assays for the activation of transcription through the cAMP response element are well-known in the art |
| | | | transcription | and may be used or routinely modified to assess the ability of polypeptides of the invention (including |
| | | | through cAMP | antibodies and agonists or antagonists of the invention) to increase cAMP, regulate CREB transcription |
| | | | response | factors, and modulate expression of genes involved in a wide variety of cell functions. For example, a |
| | | | element (CRE) | 3T3-L1/CRE reporter assay may be used to identify factors that activate the cAMP signaling pathway. |
| | | | in pre- | CREB plays a major role in adipogenesis, and is involved in differentiation into adipocytes. CRE |
| | | | adipocytes. | contains the binding sequence for the transcription factor CREB (CRE binding protein). Exemplary |
| | | | | assays for transcription through the cAMP response element that may be used or routinely modified to |
| | | | | test cAMP-response element activity of polypeptides of the invention (including antibodies and agonists |
| | | | | or antagonists of the invention) include assays disclosed in Berger et al., Gene 66: 1-10 (1998); Cullen |
| | | | | and Malm, Methods in Enzymol 216: 362-368 (1992); Henthorn et al., Proc Natl Acad Sci USA 85: 6342-6346 |
| | | | | (1988); Reusch et al., Mol Cell Biol 20(3): 1008-1020 (2000); and Klemm et al., J Biol Chem |
| | | | | 273: 917-923 (1998), the contents of each of which are herein incorporated by reference in its entirety. |
| | | | | Pre-adipocytes that may be used according to these assays are publicly available (e.g., through the |
| | | | | ATCC) and/or may be routinely generated. Exemplary mouse adipocyte cells that may be used according |
| | | | | to these assays include 3T3-L1 cells. 3T3-L1 is an adherent mouse preadipocyte cell line that is a |
| | | | | continuous substrain of 3T3 fibroblast cells developed through clonal isolation and undergo a pre- |
| | | | | adipocyte to adipose-like conversion under appropriate differentiation conditions known in the art. |
| 149 | HSDSB09 | 448 | Activation of | Assays for the activation of transcription through the Serum Response Element (SRE) are well-known in |
| | | | transcription | the art and may be used or routinely modified to assess the ability of polypeptides of the invention |
| | | | through serum | (including antibodies and agonists or antagonists of the invention) to regulate the serum response factors |
| | | | response | and modulate the expression of genes involved in growth. Exemplary assays for transcription through |
| | | | element in pre- | the SRE that may be used or routinely modified to test SRE activity of the polypeptides of the invention |
| | | | adipocytes. | (including antibodies and agonists or antagonists of the invention) include assays disclosed in Berger et |
| | | | | al., Gene 66: 1-10 (1998); Cullen and Malm, Methods in Enzymol 216: 362-368 (1992); Henthorn et al., |
| | | | | Proc Natl Acad Sci USA 85: 6342-6346 (1988); and Black et al., Virus Genes 12(2): 105-117 (1997), the |
| | | | | content of each of which are herein incorporated by reference in its entirety. Pre-adipocytes that may be |
| | | | | used according to these assays are publicly available (e.g., through the ATCC) and/or may be routinely |
| | | | | generated. Exemplary mouse adipocyte cells that may be used according to these assays include 3T3-L1 |
| | | | | cells. 3T3-L1 is an adherent mouse preadipocyte cell line that is a continuous substrain of 3T3 fibroblast |
| | | | | cells developed through clonal isolation and undergo a pre-adipocyte to adipose-like conversion under |
| | | | | appropriate differentiation conditions known in the art. |
| 149 | HSDSB09 | 448 | Activation of | Assays for the activation of transcription through the Serum Response Element (SRE) are well-known in |
| | | | transcription | the art and may be used or routinely modified to assess the ability of polypeptides of the invention |
| | | | through serum | (including antibodies and agonists or antagonists of the invention) to regulate the serum response factors |
| | | | response | and modulate the expression of genes involved in growth. Exemplary assays for transcription through |
| | | | element in | the SRE that may be used or routinely modified to test SRE activity of the polypeptides of the invention |
| | | | immune cells | (including antibodies and agonists or antagonists of the invention) include assays disclosed in Berger et |
| | | | (such as T- | al., Gene 66: 1-10 (1998); Cullen and Malm, Methods in Enzymol 216: 362-368 (1992); Henthorn et al., |
| | | | cells). | Proc Natl Acad Sci USA 85: 6342-6346 (1988); and Black et al., Virus Genes 12(2): 105-117 (1997), the |
| | | | | content of each of which are herein incorporated by reference in its entirety. T cells that may be used |
| | | | | according to these assays are publicly available (e.g., through the ATCC). Exemplary mouse T cells that |
| | | | | may be used according to these assays include the CTLL cell line, which is an IL-2 dependent suspension |
| | | | | culture of T cells with cytotoxic activity. |
| 149 | HSDSB09 | 448 | Regulation of | Assays for the regulation of transcription of Malic Enzyme are well-known in the art and may be used or |
| | | | transcription of | routinely modified to assess the ability of polypeptides of the invention (including antibodies and |
| | | | Malic Enzyme | agonists or antagonists of the invention) to regulate transcription of Malic Enzyme, a key enzyme in |
| | | | in adipocytes | lipogenesis. Malic enzyme is involved in lipogenesisand its expression is stimulted by insulin. ME |
| | | | | promoter contains two direct repeat (DR1)-like elements MEp and MEd identified as putative PPAR |
| | | | | response elements. ME promoter may also responds to AP1 and other transcription factors. Exemplary |
| | | | | assays that may be used or routinely modified to test for regulation of transcription of Malic Enzyme (in |
| | | | | adipoocytes) by polypeptides of the invention (including antibodies and agonists or antagonists of the |
| | | | | invention) include assays disclosed in: Streeper, R. S., et al., Mol Endocrinol, 12(11): 1778-91 (1998); |
| | | | | Garcia-Jimenez, C., et al., Mol Endocrinol, 8(10): 1361-9 (1994); Barroso, I., et al., J Biol Chem, |
| | | | | 274(25): 17997-8004 (1999); Ijpenberg, A., et al., J Biol Chem, 272(32): 20108-20117 (1997); Berger, et |
| | | | | al., Gene 66: 1-10 (1988); and, Cullen, B., et al., Methods in Enzymol. 216: 362-368 (1992), the contents |
| | | | | of each of which is herein incorporated by reference in its entirety. Hepatocytes that may be used |
| | | | | according to these assays are publicly available (e.g., through the ATCC) and/or may be routinely |
| | | | | generated. Exemplary hepatocytes that may be used according to these assays includes the H4IIE rat |
| | | | | liver hepatoma cell line. |
| 149 | HSDSB09 | 448 | Stimulation of | Assays for measuring calcium flux are well-known in the art and may be used or routinely modified to |
| | | | Calcium Flux in | assess the ability of polypeptides of the invention (including antibodies and agonists or antagonists of the |
| | | | pancreatic beta | invention) to mobilize calcium. For example, the FLPR assay may be used to measure influx of calcium. |
| | | | cells. | Cells normally have very low concentrations of cytosolic calcium compared to much higher extracellular |
| | | | | calcium. Extracellular factors can cause an influx of calcium, leading to activation of calcium responsive |
| | | | | signaling pathways and alterations in cell functions. Exemplary assays that may be used or routinely |
| | | | | modified to measure calcium flux by polypeptides of the invention (including antibodies and agonists or |
| | | | | antagonists of the invention) include assays disclosed in: Satin LS, et al., Endocrinology, 136(10): 4589-601 |
| | | | | (1995); Mogami H, et al., Endocrinology, 136(7): 2960-6 (1995); Richardson SB, et al., Biochem J, |
| | | | | 288 (Pt 3): 847-51 (1992); and, Meats, JE, et al., Cell Calcium 1989 Nov-Dec; 10(8): 535-41 (1989), the |
| | | | | contents of each of which is herein incorporated by reference in its entirety. Pancreatic cells that may be |
| | | | | used according to these assays are publicly available (e.g., through the ATCC) and/or may be routinely |
| | | | | generated. Exemplary pancreatic cells that may be used according to these assays include HITT15 Cells. |
| | | | | HITT15 are an adherent epithelial cell line established from Syrian hamster islet cells transformed with |
| | | | | SV40. These cells express glucagon, somatostatin, and glucocorticoid receptors. The cells secrete |
| | | | | insulin, which is stimulated by glucose and glucagon and suppressed by somatostatin or glucocorticoids. |
| | | | | ATTC# CRL-1777 Refs: Lord and Ashcroft. Biochem. J. 219: 547-551; Santerre et al. Proc. Natl. |
| | | | | Acad. Sci. USA 78: 4339-4343, 1981. |
| 149 | HSDSB09 | 448 | Activation of | This reporter assay measures activation of the GATA-3 signaling pathway in HMC-1 human mast cell |
| | | | transcription | line. Activation of GATA-3 in mast cells has been linked to cytokine and chemokine production. Assays |
| | | | through GATA- | for the activation of transcription through the GATA3 response element are well-known in the art and |
| | | | 3 response | may be used or routinely modified to assess the ability of polypeptides of the invention (including |
| | | | element in | antibodies and agonists or antagonists of the invention) to regulate GATA3 transcription factors and |
| | | | immune cells | modulate expression of mast cell genes important for immune response development. Exemplary assays |
| | | | (such as mast | for transcription through the GATA3 response element that may be used or routinely modified to test |
| | | | cells). | GATA3-response element activity of polypeptides of the invention (including antibodies and agonists or |
| | | | | antagonists of the invention) include assays disclosed in Berger et al., Gene 66: 1-10 (1998); Cullen and |
| | | | | Malm, Methods in Enzymol 216: 362-368 (1992); Henthorn et al., Proc Natl Acad Sci USA 85: 6342-6346 |
| | | | | (1988); Flavell et al., Cold Spring Harb Symp Quant Biol 64: 563-571 (1999); Rodriguez-Palmero et al., |
| | | | | Eur J Immunol 29(12): 3914-3924 (1999); Zheng and Flavell, Cell 89(4): 587-596 (1997); and Henderson |
| | | | | et al., Mol Cell Biol 14(6): 4286-4294 (1994), the contents of each of which are herein incorporated by |
| | | | | reference in its entirety. Mast cells that may be used according to these assays are publicly available |
| | | | | (e.g., through the ATCC). Exemplary human mast cells that may be used according to these assays |
| | | | | include the HMC-1 cell line, which is an immature human mast cell line established from the peripheral |
| | | | | blood of a patient with mast cell leukemia, and exhibits many characteristics of immature mast cells. |
| 149 | HSDSB09 | 448 | Activation of | This reporter assay measures activation of the NFAT signaling pathway in HMC-1 human mast cell line. |
| | | | transcription | Activation of NFAT in mast cells has been linked to cytokine and chemokine production. Assays for the |
| | | | through NFAT | activation of transcription through the Nuclear Factor of Activated T cells (NFAT) response element are |
| | | | response | well-known in the art and may be used or routinely modified to assess the ability of polypeptides of the |
| | | | element in | invention (including antibodies and agonists or antagonists of the invention) to regulate NFAT |
| | | | immune cells | transcription factors and modulate expression of genes involved in immunomodulatory functions. |
| | | | (such as mast | Exemplary assays for transcription through the NFAT response element that may be used or routinely |
| | | | cells). | modified to test NFAT-response element activity of polypeptides of the invention (including antibodies |
| | | | | and agonists or antagonists of the invention) include assays disclosed in Berger et al., Gene 66: 1-10 |
| | | | | (1998); Cullen and Malm, Methods in Enzymol 216: 362-368 (1992); Henthorn et al., Proc Natl Acad Sci |
| | | | | USA 85: 6342-6346 (1988); De Boer et al., Int J Biochem Cell Biol 31(10): 1221-1236 (1999); Ali et al., J |
| | | | | Immunol 165(12): 7215-7223 (2000); Hutchinson and McCloskey, J Biol Chem 270(27): 16333-16338 |
| | | | | (1995), and Turner et al., J Exp Med 188: 527-537 (1998), the contents of each of which are herein |
| | | | | incorporated by reference in its entirety. Mast cells that may be used according to these assays are |
| | | | | publicly available (e.g., through the ATCC). Exemplary human mast cells that may be used according to |
| | | | | these assays include the HMC-1 cell line, which is an immature human mast cell line established from |
| | | | | the peripheral blood of a patient with mast cell leukemia, and exhibits many characteristics of immature |
| | | | | mast cells. |
| 149 | HSDSB09 | 448 | Activation of | This reporter assay measures activation of the NFkB signaling pathway in HMC-1 human mast cell line. |
| | | | transcription | Activation of NFkB in mast cells has been linked to production of certain cytokines, such as IL-6 and IL- |
| | | | through NFKB | 9. Assays for the activation of transcription through the NFKB response element are well-known in the |
| | | | response | art and may be used or routinely modified to assess the ability of polypeptides of the invention (including |
| | | | element in | antibodies and agonists or antagonists of the invention) to regulate NFKB transcription factors and |
| | | | immune cells | modulate expression of immunomodulatory genes. Exemplary assays for transcription through the |
| | | | (such as mast | NFKB response element that may be used or rountinely modified to test NFKB-response element activity |
| | | | cells). | of polypeptides of the invention (including antibodies and agonists or antagonists of the invention) |
| | | | | include assays disclosed in Berger et al., Gene 66: 1-10 (1998); Cullen and Malm, Methods in Enzymol |
| | | | | 216: 362-368 (1992); Henthorn et al., Proc Natl Acad Sci USA 85: 6342-6346 (1988); Stassen et al., J |
| | | | | Immunol 166(7): 4391-8 (2001); and Marquardt and Walker, J Allergy Clin Immunol 105(3): 500-5 |
| | | | | (2000), the contents of each of which are herein incorporated by reference in its entirety. Mast cells that |
| | | | | may be used according to these assays are publicly available (e.g., through the ATCC). Exemplary |
| | | | | human mast cells that may be used according to these assays include the HMC-1 cell line, which is an |
| | | | | immature human mast cell line established from the peripheral blood of a patient with mast cell leukemia, |
| | | | | and exhibits many characteristics of immature mast cells. |
| 149 | HSDSB09 | 448 | Activation of | Assays for the activation of transcription through the Signal Transducers and Activators of Transcription |
| | | | transcription | (STAT6) response element in immune cells (such as in the human HMC-1 mast cell line) are well-known |
| | | | through STAT6 | in the art and may be used or routinely modified to assess the ability of polypeptides of the invention |
| | | | response | (including antibodies and agonists or antagonists of the invention) to regulate STAT6 transcription |
| | | | element in | factors and modulate the expression of multiple genes. Exemplary assays for transcription through the |
| | | | immune cells | STAT6 response element that may be used or routinely modified to test STAT6 response element activity |
| | | | (such as mast | of the polypeptides of the invention (including antibodies and agonists or antagonists of the invention) |
| | | | cells). | include assays disclosed in Berger et al., Gene 66: 1-10 (1998); Cullen and Malm, Methods in Enzymol |
| | | | | 216: 362-368 (1992); Henthorn et al., Proc Natl Acad Sci USA 85: 6342-6346 (1988); Sherman, Immunol |
| | | | | Rev 179: 48-56 (2001); Malaviya and Uckun, J Immunol 168: 421-426 (2002); Masuda et al., J Biol Chem |
| | | | | 275(38): 29331-29337 (2000); and Masuda et al., J Biol Chem 276: 26107-26113 (2001), the contents of |
| | | | | each of which are herein incorporated by reference in its entirety. Mast cells that may be used according |
| | | | | to these assays are publicly available (e.g., through the ATCC). Exemplary human mast cells that may be |
| | | | | used according to these assays include the HMC-1 cell line, which is an immature human mast cell line |
| | | | | established from the peripheral blood of a patient with mast cell leukemia, and exhibits many |
| | | | | characteristics of immature mast cells. |
| 149 | HSDSB09 | 448 | Stimulation of | Assays for measuring secretion of insulin are well-known in the art and may be used or routinely |
| | | | insulin secretion | modified to assess the ability of polypeptides of the invention (including antibodies and agonists or |
| | | | from pancreatic | antagonists of the invention) to stimulate insulin secretion. For example, insulin secretion is measured by |
| | | | beta cells. | FMAT using anti-rat insulin antibodies. Insulin secretion from pancreatic beta cells is upregulated by |
| | | | | glucose and also by certain proteins/peptides, and disregulation is a key component in diabetes. |
| | | | | Exemplary assays that may be used or routinely modified to test for stimulation of insulin secretion (from |
| | | | | pancreatic cells) by polypeptides of the invention (including antibodies and agonists or antagonists of the |
| | | | | invention) include assays disclosed in: Ahren, B., et al., Am J Physiol, 277(4 Pt 2): R959-66 (1999); Li, M., |
| | | | | et al., Endocrinology, 138(9): 3735-40 (1997); Kim, K. H., et al., FEBS Lett, 377(2): 237-9 (1995); |
| | | | | and, Miraglia S et. al., Journal of Biomolecular Screening, 4: 193-204 (1999), the contents of each of |
| | | | | which is herein incorporated by reference in its entirety. Pancreatic cells that may be used according to |
| | | | | these assays are publicly available (e.g., through the ATCC) and/or may be routinely generated. |
| | | | | Exemplary pancreatic cells that may be used according to these assays include rat INS-1 cells. INS-1 |
| | | | | cells are a semi-adherent cell line established from cells isolated from an X-ray induced rat transplantable |
| | | | | insulinoma. These cells retain characteristics typical of native pancreatic beta cells including glucose |
| | | | | inducible insulin secretion. References: Asfari et al. Endocrinology 1992 130: 167. |
| 149 | HSDSB09 | 448 | Activation of | This reporter assay measures activation of the NFkB signaling pathway in Ku812 human basophil cell |
| | | | transcription | line. Assays for the activation of transcription through the NFKB response element are well-known in the |
| | | | through NFKB | art and may be used or routinely modified to assess the ability of polypeptides of the invention (including |
| | | | response | antibodies and agonists or antagonists of the invention) to regulate NFKB transcription factors and |
| | | | element in | modulate expression of immunomodulatory genes. Exemplary assays for transcription through the |
| | | | immune cells | NFKB response element that may be used or rountinely modified to test NFKB-response element activity |
| | | | (such as | of polypeptides of the invention (including antibodies and agonists or antagonists of the invention) |
| | | | basophils). | include assays disclosed in Berger et al., Gene 66: 1-10 (1998); Cullen and Malm, Methods in Enzymol |
| | | | | 216: 362-368 (1992); Henthorn et al., Proc Natl Acad Sci USA 85: 6342-6346 (1988); Marone et al, Int |
| | | | | Arch Allergy Immunol 114(3): 207-17 (1997), the contents of each of which are herein incorporated by |
| | | | | reference in its entirety. Basophils that may be used according to these assays are publicly available |
| | | | | (e.g., through the ATCC). Exemplary human basophil cell lines that may be used according to these |
| | | | | assays include Ku812, originally established from a patient with chronic myelogenous leukemia. It is an |
| | | | | immature prebasophilic cell line that can be induced to differentiate into mature basophils. |
| 149 | HSDSB09 | 448 | Activation of | Assays for the activation of transcription through the Signal Transducers and Activators of Transcription |
| | | | transcription | (STAT6) response element are well-known in the art and may be used or routinely modified to assess the |
| | | | through STAT6 | ability of polypeptides of the invention (including antibodies and agonists or antagonists of the invention) |
| | | | response | to regulate STAT6 transcription factors and modulate the expression of multiple genes. Exemplary |
| | | | element in | assays for transcription through the STAT6 response element that may be used or routinely modified to |
| | | | immune cells | test STAT6 response element activity of the polypeptides of the invention (including antibodies and |
| | | | (such as T- | agonists or antagonists of the invention) include assays disclosed in Berger et al., Gene 66: 1-10 (1998); |
| | | | cells). | Cullen and Malm, Methods in Enzymol 216: 362-368 (1992); Henthorn et al., Proc Natl Acad Sci USA |
| | | | | 85: 6342-6346 (1988); Georas et al., Blood 92(12): 4529-4538 (1998); Moffatt et al., Transplantation |
| | | | | 69(7): 1521-1523 (2000); Curiel et al., Eur J Immunol 27(8): 1982-1987 (1997); and Masuda et al., J Biol |
| | | | | Chem 275(38): 29331-29337 (2000), the contents of each of which are herein incorporated by reference in |
| | | | | its entirety. T cells that may be used according to these assays are publicly available (e.g., through the |
| | | | | ATCC). Exemplary T cells that may be used according to these assays include the SUPT cell line, which |
| | | | | is a suspension culture of IL-2 and IL-4 responsive T cells. |
| 149 | HSDSB09 | 448 | Activation of | Assays for the activation of transcription through the Serum Response Element (SRE) are well-known in |
| | | | transcription | the art and may be used or routinely modified to assess the ability of polypeptides of the invention |
| | | | through serum | (including antibodies and agonists or antagonists of the invention) to regulate serum response factors and |
| | | | response | modulate the expression of genes involved in growth and upregulate the function of growth-related genes |
| | | | element in | in many cell types. Exemplary assays for transcription through the SRE that may be used or routinely |
| | | | immune cells | modified to test SRE activity of the polypeptides of the invention (including antibodies and agonists or |
| | | | (such as natural | antagonists of the invention) include assays disclosed in Berger et al., Gene 66: 1-10 (1998); Cullen and |
| | | | killer cells). | Malm, Methods in Enzymol 216: 362-368 (1992); Henthorn et al., Proc Natl Acad Sci USA 85: 6342-6346 |
| | | | | (1988); Benson et al., J Immunol 153(9): 3862-3873 (1994); and Black et al., Virus Genes 12(2): 105-117 |
| | | | | (1997), the content of each of which are herein incorporated by reference in its entirety. T cells that may |
| | | | | be used according to these assays are publicly available (e.g., through the ATCC). Exemplary T cells |
| | | | | that may be used according to these assays include the NK-YT cell line, which is a human natural killer |
| | | | | cell line with cytolytic and cytotoxic activity. |
| 150 | HSDSE75 | 449 | Myoblast cell | Assays for muscle cell proliferation are well known in the art and may be used or routinely modified to |
| | | | proliferation | assess the ability of polypeptides of the invention (including antibodies and agonists or antagonists of the |
| | | | | invention) to stimulate or inhibit myoblast cell proliferation. Exemplary assays for myoblast cell |
| | | | | proliferation that may be used or routinely modified to test activity of polypeptides and antibodies of the |
| | | | | invention (including agonists or antagonists of the invention) include, for example, assays disclosed in: |
| | | | | Soeta, C., et al. “Possible role for the c-ski gene in the proliferation of myogenic cells in regenerating |
| | | | | skeletal muscles of rats” Dev Growth Differ Apr; 43(2): 155-64 (2001); Ewton DZ, et al., “IGF binding |
| | | | | proteins-4, -5 and -6 may play specialized roles during L6 myoblast proliferation and differentiation” J |
| | | | | Endocrinol Mar; 144(3): 539-53 (1995); and, Pampusch MS. et al., “Effect of transforming growth factor |
| | | | | beta on proliferation of L6 and embryonic porcine myogenic cells” J Cell Physiol Jun; 143(3): 524-8 |
| | | | | (1990); the contents of each of which are herein incorporated by reference in their entirety. Exemplary |
| | | | | myoblast cells that may be used according to these assays include the rat myoblast L6 cell line. Rat |
| | | | | myoblast L6 cells are an adherent rat myoblast cell line, isolated from primary cultures of rat thigh |
| | | | | muscle, that fuse to form multinucleated myotubes and striated fibers after culture in differentiation |
| | | | | media. |
| 150 | HSDSE75 | 449 | Production of | IL-6 FMAT. IL-6 is produced by T cells and has strong effects on B cells. IL-6 participates in IL-4 |
| | | | IL-6 | induced IgE production and increases IgA production (IgA plays a role in mucosal immunity). IL-6 |
| | | | | induces cytotoxic T cells. Deregulated expression of IL-6 has been linked to autoimmune disease, |
| | | | | plasmacytomas, myelomas, and chronic hyperproliferative diseases. Assays for immunomodulatory and |
| | | | | differentiation factor proteins produced by a large variety of cells where the expression level is strongly |
| | | | | regulated by cytokines, growth factors, and hormones are well known in the art and may be used or |
| | | | | routinely modified to assess the ability of polypeptides of the invention (including antibodies and |
| | | | | agonists or antagonists of the invention) to mediate immunomodulation and differentiation and modulate |
| | | | | T cell proliferation and function. Exemplary assays that test for immunomodulatory proteins evaluate the |
| | | | | production of cytokines, such as IL-6, and the stimulation and upregulation of T cell proliferation and |
| | | | | functional activities. Such assays that may be used or routinely modified to test immunomodulatory and |
| | | | | diffferentiation activity of polypeptides of the invention (including antibodies and agonists or antagonists |
| | | | | of the invention) include assays disclosed in Miraglia et al., J Biomolecular Screening 4: 193-204(1999); |
| | | | | Rowland et at., “Lymphocytes: a practical approach” Chapter 6: 138-160 (2000); and Verhasselt et al., J |
| | | | | Immunol 158: 2919-2925 (1997), the contents of each of which are herein incorporated by reference in its |
| | | | | entirety. Human dendritic cells that may be used according to these assays may be isolated using |
| | | | | techniques disclosed herein or otherwise known in the art. Human dendritic cells are antigen presenting |
| | | | | cells in suspension culture, which, when activated by antigen and/or cytokines, initiate and upregulate T |
| | | | | cell proliferation and functional activities. |
| 151 | HSIDJ81 | 450 | Insulin | Assays for measuring secretion of insulin are well-known in the art and may be used or routinely |
| | | | Secretion | modified to assess the ability of polypeptides of the invention (including antibodies and agonists or |
| | | | | antagonists of the invention) to stimulate insulin secretion. For example, insulin secretion is measured by |
| | | | | FMAT using anti-rat insulin antibodies. Insulin secretion from pancreatic beta cells is upregulated by |
| | | | | glucose and also by certain proteins/peptides, and disregulation is a key component in diabetes. |
| | | | | Exemplary assays that may be used or routinely modified to test for stimulation of insulin secretion (from |
| | | | | pancreatic cells) by polypeptides of the invention (including antibodies and agonists or antagonists of the |
| | | | | invention) include assays disclosed in: Shimizu, H., et al., Endocr J, 47(3): 261-9 (2000); Salapatek, A. M., |
| | | | | et al., Mol Endocrinol, 13(8): 1305-17 (1999); Filipsson, K., et al., Ann NY Acad Sci, 865: 441-4 |
| | | | | (1998); Olson, L. K., et al., J Biol Chem, 271(28): 16544-52 (1996); and, Miraglia S et. al, Journal of |
| | | | | Biomolecular Screening, 4: 193-204 (1999), the contents of each of which is herein incorporated by |
| | | | | reference in its entirety. Pancreatic cells that may be used according to these assays are publicly |
| | | | | available (e.g., through the ATCC) and/or may be routinely generated. Exemplary pancreatic cells that |
| | | | | may be used according to these assays include HITT15 Cells. HITT15 are an adherent epithelial cell line |
| | | | | established from Syrian hamster islet cells transformed with SV40. These cells express glucagon, |
| | | | | somatostatin, and glucocorticoid receptors. The cells secrete insulin, which is stimulated by glucose and |
| | | | | glucagon and suppressed by somatostatin or glucocorticoids. ATTC# CRL-1777 Refs: Lord and |
| | | | | Ashcroft. Biochem. J. 219: 547-551; Santerre et al. Proc. Natl. Acad. Sci. USA 78: 4339-4343, 1981. |
| 151 | HSIDJ81 | 450 | Activation of | Assays for the activation of transcription through the NFKB response element are well-known in the art |
| | | | transcription | and may be used or routinely modified to assess the ability of polypeptides of the invention (including |
| | | | through NFKB | antibodies and agonists or antagonists of the invention) to regulate NFKB transcription factors and |
| | | | response | modulate expression of neuronal genes. Exemplary assays for transcription through the NFKB response |
| | | | element in | element that may be used or routinely modified to test NFKB-response element activity of polypeptides |
| | | | neuronal cells | of the invention (including antibodies and agonists or antagonists of the invention) include assays |
| | | | (such as | disclosed in: Gill JS, et al., Neurobiol Dis, 7(4): 448-461 (2000); Tamatani M, et al., J Biol Chem, |
| | | | SKNMC cells). | 274(13): 8531-8538 (1999); Berger et al., Gene 66: 1-10 (1998); Cullen and Malm, Methods in Enzymol |
| | | | | 216: 362-368 (1992); Henthorn et al., Proc Natl Acad Sci USA 85: 6342-6346 (1988); Valle Blazquez et |
| | | | | al, Immunology 90(3): 455-460 (1997); Aramburau et al., J Exp Med 82(3): 801-810 (1995); and Fraser et |
| | | | | al., 29(3): 838-844 (1999), the contents of each of which are herein incorporated by reference in its |
| | | | | entirety. Neuronal cells that may be used according to these assays are publicly available (e.g., through |
| | | | | the ATCC). Exemplary neuronal cells that may be used according to these assays include the SKNMC |
| | | | | neuronal cell line. |
| 152 | HSKDA27 | 451 | Production of | GM-CSF FMAT. GM-CSF is expressed by activated T cells, macrophages, endothelial cells, and |
| | | | GM-CSF | fibroblasts. GM-CSF regulates differentiation and proliferation of granulocytes-macrophage progenitors |
| | | | | and enhances antimicrobial activity in neutrophils, monocytes and macrophage. Additionally, GM-CSF |
| | | | | plays an important role in the differentiation of dendritic cells and monocytes, and increases antigen |
| | | | | presentation. GM-CSF is considered to be a proinflammatory cytokine. Assays for immunomodulatory |
| | | | | proteins that promote the production of GM-CSF are well known in the art and may be used or routinely |
| | | | | modified to assess the ability of polypeptides of the invention (including antibodies and agonists or |
| | | | | antagonists of the invention) to mediate immunomodulation and modulate the growth and differentiation |
| | | | | of leukocytes. Exemplary assays that test for immunomodulatory proteins evaluate the production of |
| | | | | cytokines, such as GM-CSF, and the activation of T cells. Such assays that may be used or routinely |
| | | | | modified to test immunomodulatory activity of polypeptides of the invention (including antibodies and |
| | | | | agonists or antagonists of the invention) include the assays disclosed in Miraglia et al., J Biomolecular |
| | | | | Screening 4: 193-204 (1999); Rowland et al., “Lymphocytes: a practical approach” Chapter 6: 138-160 |
| | | | | (2000); and Ye et al., J Leukoc Biol (58(2): 225-233, the contents of each of which are herein |
| | | | | incorporated by reference in its entirety. Natural killer cells that may be used according to these assays |
| | | | | are publicly available (e.g., through the ATCC) or may be isolated using techniques disclosed herein or |
| | | | | otherwise known in the art. Natural killer (NK) cells are large granular lymphocytes that have cytotoxic |
| | | | | activity but do bind antigen. NK cells show antibody-independent killing of tumor cells and also |
| | | | | recognize antibody bound on target cells, via NK Fc receptors, leading to cell-mediated cytotoxicity. |
| 152 | HSKDA27 | 451 | Regulation of | Caspase Apoptosis. Assays for caspase apoptosis are well known in the art and may be used or |
| | | | apoptosis in | routinely modified to assess the ability of polypeptides of the invention (including antibodies and |
| | | | pancreatic beta cells. | agonists or antagonists of the invention) to promote caspase protease-mediated apoptosis. Apoptosis in |
| | | | | pancreatic beta is associated with induction and progression of diabetes. Exemplary assays for caspase |
| | | | | apoptosis that may be used or routinely modified to test capase apoptosis activity of polypeptides of the |
| | | | | invention (including antibodies and agonists or antagonists of the invention) include the assays disclosed |
| | | | | in: Loweth, AC, et al., FEBS Lett, 400(3): 285-8 (1997); Saini, KS, et al., Biochem Mol Biol Int, |
| | | | | 39(6): 1229-36 (1996); Krautheim, A., et al., Br J Pharmacol, 129(4): 687-94 (2000); Chandra J, et al., |
| | | | | Diabetes, 50 Suppl 1: S44-7 (2001); Suk K, et al., J Immunol, 166(7): 4481-9 (2001); Tejedo J, et al., |
| | | | | FEBS Lett, 459(2): 238-43 (1999); Zhang, S., et al., FEDS Lett, 455(3): 315-20 (1999); Lee et al., FEBS |
| | | | | Lett 485(2-3): 122-126 (2000); Nor et al., J Vasc Res 37(3): 209-218 (2000); and Karsan and Harlan, J |
| | | | | Atheroscler Thromb 3(2): 75-80 (1996); the contents of each of which are herein incorporated by |
| | | | | reference in its entirety. Pancreatic cells that may be used according to these assays are publicly |
| | | | | available (e.g., through the ATCC) and/or may be routinely generated. Exemplary pancreatic cells that |
| | | | | may be used according to these assays include RIN-m. RIN-m is a rat adherent pancreatic beta cell |
| | | | | insulinoma cell line derived from a radiation induced transplantable rat islet cell tumor. The cells |
| | | | | produce and secrete islet polypeptide hormones, and produce insulin, somatostatin, and possibly |
| | | | | glucagon. ATTC: #CRL-2057 Chick et al. Proc. Natl. Acad. Sci. 1977 74: 628; AF et al. Proc. Natl. Acad. Sci. |
| | | | | 1980 77: 3519. |
| 153 | HSKGN81 | 452 | Stimulation of | Assays for measuring secretion of insulin are well-known in the art and may be used or routinely |
| | | | insulin secretion | modified to assess the ability of polypeptides of the invention (including antibodies and agonists or |
| | | | from pancreatic | antagonists of the invention) to stimulate insulin secretion. For example, insulin secretion is measured by |
| | | | beta cells. | FMAT using anti-rat insulin antibodies. Insulin secretion from pancreatic beta cells is upregulated by |
| | | | | glucose and also by certain proteins/peptides, and disregulation is a key component in diabetes. |
| | | | | Exemplary assays that may be used or routinely modified to test for stimulation of insulin secretion (from |
| | | | | pancreatic cells) by polypeptides of the invention (including antibodies and agonists or antagonists of the |
| | | | | invention) include assays disclosed in: Ahren, B., et al., Am J Physiol, 277(4 Pt 2): R959-66 (1999); Li, M., |
| | | | | et al., Endocrinology, 138(9): 3735-40 (1997); Kim, K. H., et al., FEBS Lett, 377(2): 237-9 (1995); |
| | | | | and, Miraglia S et. al., Journal of Biomolecular Screening, 4: 193-204 (1999), the contents of each of |
| | | | | which is herein incorporated by reference in its entirety. Pancreatic cells that may be used according to |
| | | | | these assays are publicly available (e.g., through the ATCC) and/or may be routinely generated. |
| | | | | Exemplary pancreatic cells that may be used according to these assays include rat INS-1 cells. INS-1 |
| | | | | cells are a semi-adherent cell line established from cells isolated from an X-ray induced rat transplantable |
| | | | | insulinoma. These cells retain characteristics typical of native pancreatic beta cells including glucose |
| | | | | inducible insulin secretion. References: Asfari et al. Endocrinology 1992 130: 167. |
| 154 | HSNAD72 | 453 | Stimulation of | Assays for measuring secretion of insulin are well-known in the art and may be used or routinely |
| | | | insulin secretion | modified to assess the ability of polypeptides of the invention (including antibodies and agonists or |
| | | | from pancreatic | antagonists of the invention) to stimulate insulin secretion. For example, insulin secretion is measured by |
| | | | beta cells. | FMAT using anti-rat insulin antibodies. Insulin secretion from pancreatic beta cells is upregulated by |
| | | | | glucose and also by certain proteins/peptides, and disregulation is a key component in diabetes. |
| | | | | Exemplary assays that may be used or routinely modified to test for stimulation of insulin secretion (from |
| | | | | pancreatic cells) by polypeptides of the invention (including antibodies and agonists or antagonists of the |
| | | | | invention) include assays disclosed in: Ahren, B., et al., Am J Physiol, 277(4 Pt 2): R959-66 (1999); Li, M., |
| | | | | et al., Endocrinology, 138(9): 3735-40 (1997); Kim, K. H., et al., FEBS Left, 377(2): 237-9 (1995); |
| | | | | and, Miraglia S et. al., Journal of Biomolecular Screening, 4: 193-204 (1999), the contents of each of |
| | | | | which is herein incorporated by reference in its entirety. Pancreatic cells that may be used according to |
| | | | | these assays are publicly available (e.g., through the ATCC) and/or may be routinely generated. |
| | | | | Exemplary pancreatic cells that may be used according to these assays include rat INS-1 cells. INS-1 |
| | | | | cells are a semi-adherent cell line established from cells isolated from an X-ray induced rat transplantable |
| | | | | insulinoma. These cells retain characteristics typical of native pancreatic beta cells including glucose |
| | | | | inducible insulin secretion. References: Asfari et al. Endocrinology 1992 130: 167. |
| 155 | HSNMC45 | 454 | Stimulation of | Assays for measuring calcium flux are well-known in the art and may be used or routinely modified to |
| | | | Calcium Flux in | assess the ability of polypeptides of the invention (including antibodies and agonists or antagonists of the |
| | | | pancreatic beta | invention) to mobilize calcium. For example, the FLPR assay may be used to measure influx of calcium. |
| | | | cells. | Cells normally have very low concentrations of cytosolic calcium compared to much higher extracellular |
| | | | | calcium. Extracellular factors can cause an influx of calcium, leading to activation of calcium responsive |
| | | | | signaling pathways and alterations in cell functions. Exemplary assays that may be used or routinely |
| | | | | modified to measure calcium flux by polypeptides of the invention (including antibodies and agonists or |
| | | | | antagonists of the invention) include assays disclosed in: Satin LS, et al., Endocrinology, 136(10): 4589-601 |
| | | | | (1995); Mogami H, et al., Endocrinology, 136(7): 2960-6 (1995); Richardson SB, et al., Biochem J, |
| | | | | 288 (Pt 3): 847-51 (1992); and, Meats, JE, et al., Cell Calcium 1989 Nov-Dec; 10(8): 535-41 (1989), the |
| | | | | contents of each of which is herein incorporated by reference in its entirety. Pancreatic cells that may be |
| | | | | used according to these assays are publicly available (e.g., through the ATCC) and/or may be routinely |
| | | | | generated. Exemplary pancreatic cells that may be used according to these assays include HITT15 Cells. |
| | | | | HITT15 are an adherent epithelial cell line established from Syrian hamster islet cells transformed with |
| | | | | SV40. These cells express glucagon, somatostatin, and glucocorticoid receptors. The cells secrete |
| | | | | insulin, which is stimulated by glucose and glucagon and suppressed by somatostatin or glucocorticoids. |
| | | | | ATTC# CRL-1777 Refs: Lord and Ashcroft. Biochem. J. 219: 547-551; Santerre et al. Proc. Natl. |
| | | | | Acad. Sci. USA 78: 4339-4343, 1981. |
| 156 | HSQFP66 | 455 | Stimulation of | Assays for measuring secretion of insulin are well-known in the art and may be used or routinely |
| | | | insulin secretion | modified to assess the ability of polypeptides of the invention (including antibodies and agonists or |
| | | | from pancreatic | antagonists of the invention) to stimulate insulin secretion. For example, insulin secretion is measured by |
| | | | beta cells. | FMAT using anti-rat insulin antibodies. Insulin secretion from pancreatic beta cells is upregulated by |
| | | | | glucose and also by certain proteins/peptides, and disregulation is a key component in diabetes. |
| | | | | Exemplary assays that may be used or routinely modified to test for stimulation of insulin secretion (from |
| | | | | pancreatic cells) by polypeptides of the invention (including antibodies and agonists or antagonists of the |
| | | | | invention) include assays disclosed in: Ahren, B., et al., Am J Physiol, 277(4 Pt 2): R959-66 (1999); Li, M., |
| | | | | et al., Endocrinology, 138(9): 3735-40 (1997); Kim, K. H., et al., FEBS Lett, 377(2): 237-9 (1995); |
| | | | | and, Miraglia S et. al., Journal of Biomolecular Screening, 4: 193-204 (1999), the contents of each of |
| | | | | which is herein incorporated by reference in its entirety. Pancreatic cells that may be used according to |
| | | | | these assays are publicly available (e.g., through the ATCC) and/or may be routinely generated. |
| | | | | Exemplary pancreatic cells that may be used according to these assays include rat INS-1 cells. INS-1 |
| | | | | cells are a semi-adherent cell line established from cells isolated from an X-ray induced rat transplantable |
| | | | | insulinoma. These cells retain characteristics typical of native pancreatic beta cells including glucose |
| | | | | inducible insulin secretion. References: Asfari et al. Endocrinology 1992 130: 167. |
| 157 | HSRFZ57 | 456 | Regulation of | Assays for the regulation of transcription through the FAS promoter element are well-known in the art |
| | | | transcription | and may be used or routinely modified to assess the ability of polypeptides of the invention (including |
| | | | through the FAS | antibodies and agonists or antagonists of the invention) to activate the FAS promoter element in a |
| | | | promoter | reporter construct and to regulate transcription of FAS, a key enzyme for lipogenesis. FAS promoter is |
| | | | element in hepatocytes | regulated by many transcription factors including SREBP. Insulin increases FAS gene transcription in |
| | | | | livers of diabetic mice. This stimulation of transcription is also somewhat glucose dependent. |
| | | | | Exemplary assays that may be used or routinely modified to test for FAS promoter element activity (in |
| | | | | hepatocytes) by polypeptides of the invention (including antibodies and agonists or antagonists of the |
| | | | | invention) include assays disclosed in Xiong, S., et al., Proc Natl Acad Sci U.S.A., 97(8): 3948-53 (2000); |
| | | | | Roder, K., et al., Eur J Biochem, 260(3): 743-51 (1999); Oskouian B, et al., Biochem J, 317 (Pt 1): 257-65 |
| | | | | (1996); Berger, et al., Gene 66: 1-10 (1988); and, Cullen, B., et al., Methods in Enzymol. 216: 362-368 |
| | | | | (1992), the contents of each of which is herein incorporated by reference in its entirety. Hepatocytes that |
| | | | | may be used according to these assays, such as H4IIE cells, are publicly available (e.g., through the |
| | | | | ATCC) and/or may be routinely generated. Exemplary hepatocytes that may be used according to these |
| | | | | assays include rat liver hepatoma cell line(s) inducible with glucocorticoids, insulin, or cAMP |
| | | | | derivatives. |
| 158 | HSUBW09 | 457 | Regulation of | Assays for the regulation of transcription through the FAS promoter element are well-known in the art |
| | | | transcription | and may be used or routinely modified to assess the ability of polypeptides of the invention (including |
| | | | through the FAS | antibodies and agonists or antagonists of the invention) to activate the FAS promoter element in a |
| | | | promoter | reporter construct and to regulate transcription of FAS, a key enzyme for lipogenesis. FAS promoter is |
| | | | element in | regulated by many transcription factors including SREBP. Insulin increases FAS gene transcription in |
| | | | hepatocytes | livers of diabetic mice. This stimulation of transcription is also somewhat glucose dependent. |
| | | | | Exemplary assays that may be used or routinely modified to test for FAS promoter element activity (in |
| | | | | hepatocytes) by polypeptides of the invention (including antibodies and agonists or antagonists of the |
| | | | | invention) include assays disclosed in Xiong, S., et al., Proc Natl Acad Sci U.S.A., 97(8): 3948-53 (2000); |
| | | | | Roder, K., et al., Eur J Biochem, 260(3): 743-51 (1999); Oskouian B, et al., Biochem J, 317 (Pt 1): 257-65 |
| | | | | (1996); Berger, et al., Gene 66: 1-10 (1988); and, Cullen, B., et al., Methods in Euzymol. 216: 362-368 |
| | | | | (1992), the contents of each of which is herein incorporated by reference in its entirety. Hepatocytes that |
| | | | | may be used according to these assays, such as H4IIE cells, are publicly available (e.g., through the |
| | | | | ATCC) and/or may be routinely generated. Exemplary hepatocytes that may be used according to these |
| | | | | assays include rat liver hepatoma cell line(s) inducible with glucocorticoids, insulin, or cAMP derivatives. |
| 158 | HSUBW09 | 457 | Upregulation of | CD152 FMAT. CD152 (a.k.a. CTLA-4) expression is restricted to activated T cells. CD152 is a |
| | | | CD152 and | negative regulator of T cell proliferation. Reduced CD152 expression has been linked to |
| | | | activation of T | hyperproliferative and autolimmune diseases. Overexpression of CD152 may lead to impaired |
| | | | cells | immunoresponses. Assays for immunomodulatory proteins important in the maintenance of T cell |
| | | | | homeostasis and expressed almost exclusively on CD4+ and CD8+ T cells are well known in the art and |
| | | | | may be used or routinely modified to assess the ability of polypeptides of the invention (including |
| | | | | antibodies and agonists or antagonists of the invention) to modulate the activation of T cells, maintain T |
| | | | | cell homeostasis, and/or mediate humoral or cell-mediated immunity. Exemplary assays that test for |
| | | | | immunomodulatory proteins evaluate the upregulation of cell surface markers, such as CD152, and the |
| | | | | activation of T cells. Such assays that may be used or routinely modified to test immunomodulatory |
| | | | | activity of polypeptides of the invention (including antibodies and agonists or antagonists of the |
| | | | | invention) include, for example, the assays disclosed in Miraglia et al., J Biomolecular Screening 4: 193-204 |
| | | | | (1999); Rowland et al., “Lymphocytes: a practical approach” Chapter 6: 138-160 (2000); McCoy et |
| | | | | al., Immunol Cell Biol 77(1): 1-10 (1999); Oostervegal et al., Curr Opin Immunol 11(3): 294-300 (1999); |
| | | | | and Saito T, Curr Opin Immunol 10(3): 313-321 (1998), the contents of each of which are herein |
| | | | | incorporated by reference in its entirety. Human T cells that may be used according to these assays may |
| | | | | be isolated using techniques disclosed herein or otherwise known in the art. Human T cells are primary. |
| | | | | human lymphocytes that mature in the thymus and express a T Cell receptor and CD3, CD4, or CD8. |
| | | | | These cells mediate humoral or cell-mediated immunity and may be preactivated to enhance |
| | | | | responsiveness to immunomodulatory factors. |
| 159 | HSVBU91 | 458 | Activation of | Assays for the activation of transcription through the cAMP response element are well-known in the art |
| | | | transcription | and may be used or routinely modified to assess the ability of polypeptides of the invention (including |
| | | | through cAMP | antibodies and agonists or antagonists of the invention) to increase cAMP, regulate CREB transcription |
| | | | response | factors, and modulate expression of genes involved in a wide variety of cell functions. For example, a |
| | | | element (CRE) | 3T3-L1/CRE reporter assay may be used to identify factors that activate the cAMP signaling pathway. |
| | | | in pre- | CREB plays a major role in adipogenesis, and is involved in differentiation into adipocytes. CRE |
| | | | adipocytes. | contains the binding sequence for the transcription factor CREB (CRE binding protein). Exemplary |
| | | | | assays for transcription through the cAMP response element that may be used or routinely modified to |
| | | | | test cAMP-response element activity of polypeptides of the invention (including antibodies and agonists |
| | | | | or antagonists of the invention) include assays disclosed in Berger et al., Gene 66: 1-10 (1998); Cullen |
| | | | | and Malm, Methods in Euzymol 216: 362-368 (1992); Henthorn et al., Proc Natl Acad Sci USA 85: 6342-6346 |
| | | | | (1988); Reusch et al., Mol Cell Biol 20(3): 1008-1020 (2000); and Klemm et al., J Biol Chem |
| | | | | 273: 917-923 (1998), the contents of each of which are herein incorporated by reference in its entirety. |
| | | | | Pre-adipocytes that may be used according to these assays are publicly available (e.g., through the |
| | | | | ATCC) and/or may be routinely generated. Exemplary mouse adipocyte cells that may be used according |
| | | | | to these assays include 3T3-L1 cells. 3T3-L1 is an adherent mouse preadipocyte cell line that is a |
| | | | | continuous substrain of 3T3 fibroblast cells developed through clonal isolation and undergo a pre- |
| | | | | adipocyte to adipose-like conversion under appropriate differentiation conditions known in the art. |
| 159 | HSVBU91 | 458 | Activation of | Kinase assay. Kinase assays, for example an Elk-1 kinase assay, for ERK signal transduction that |
| | | | Hepatocyte | regulate cell proliferation or differentiation are well known in the art and may be used or routinely |
| | | | ERK Signaling | modified to assess the ability of polypeptides of the invention (including antibodies and agonists or |
| | | | Pathway | antagonists of the invention) to promote or inhibit cell proliferation, activation, and differentiation. |
| | | | | Exemplary assays for ERK kinase activity that may be used or routinely modified to test ERK kinase- |
| | | | | induced activity of polypeptides of the invention (including antibodies and agonists or antagonists of the |
| | | | | invention) include the assays disclosed in Forrer et al., Biol Chem 379(8-9): 1101-1110 (1998); Kyriakis |
| | | | | JM, Biochem Soc Symp 64: 29-48 (1999); Chang and Karin, Nature 410(6824): 37-40 (2001); and Cobb |
| | | | | MH, Prog Biophys Mol Biol 71(3-4): 479-500 (1999); the contents of each of which are herein |
| | | | | incorporated by reference in its entirety. Rat liver hepatoma cells that may be used according to these |
| | | | | assays are publicly available (e.g., through the ATCC). Exemplary rat liver hepatoma cells that may be |
| | | | | used according to these assays include H4lle cells, which are known to respond to glucocorticoids, |
| | | | | insulin, or cAMP derivatives. |
| 159 | HSVBU91 | 458 | Insulin | Assays for measuring secretion of insulin are well-known in the art and may be used or routinely |
| | | | Secretion | modified to assess the ability of polypeptides of the invention (including antibodies and agonists or |
| | | | | antagonists of the invention) to stimulate insulin secretion. For example, insulin secretion is measured by |
| | | | | FMAT using anti-rat insulin antibodies. Insulin secretion from pancreatic beta cells is upregulated by |
| | | | | glucose and also by certain proteins/peptides, and disregulation is a key component in diabetes. |
| | | | | Exemplary assays that may be used or routinely modified to test for stimulation of insulin secretion (from |
| | | | | pancreatic cells) by polypeptides of the invention (including antibodies and agonists or antagonists of the |
| | | | | invention) include assays disclosed in: Shimizu, H., et al., Endocr J, 47(3): 261-9 (2000); Salapatek, A. M., |
| | | | | et al., Mol Endocrinol, 13(8): 1305-17 (1999); Filipsson, K., et al., Ann N Y Acad Sci, 865: 441-4 |
| | | | | (1998); Olson, L. K., et al., J Biol Chem, 271(28): 16544-52 (1996); and, Miraglia S et. al., Journal of |
| | | | | Biomolecular Screening, 4: 193-204 (1999), the contents of each of which is herein incorporated by |
| | | | | reference in its entirety. Pancreatic cells that may be used according to these assays are publicly |
| | | | | available (e.g., through the ATCC) and/or may be routinely generated. Exemplary pancreatic cells that |
| | | | | may be used according to these assays include HITT15 Cells. HITT15 are an adherent epithelial cell line |
| | | | | established from Syrian hamster islet cells transformed with SV40. These cells express glucagon, |
| | | | | somatostatin, and glucocorticoid receptors. The cells secrete insulin, which is stimulated by glucose and |
| | | | | glucagon and suppressed by somatostatin or glucocorticoids. ATTC# CRL-1777 Refs: Lord and |
| | | | | Ashcroft. Biochem. J. 219: 547-551; Santerre et al. Proc. Natl. Acad. Sci. USA 78: 4339-4343, 1981. |
| 159 | HSVBU91 | 458 | Activation of | Assays for the activation of transcription through the CD28 response element are well-known in the art |
| | | | transcription | and may be used or routinely modified to assess the ability of polypeptides of the invention (including |
| | | | through CD28 | antibodies and agonists or antagonists of the invention) to stimulate IL-2 expression in T cells. |
| | | | response | Exemplary assays for transcription through the CD28 response element that may be used or routinely |
| | | | element in | modified to test CD28-response element activity of polypeptides of the invention (including antibodies |
| | | | immune cells | and agonists or antagonists of the invention) include assays disclosed in Berger et al., Gene 66: 1-10 |
| | | | (such as T- | (1998); Cullen and Malm, Methods in Enzymol 216: 362-368 (1992); Henthorn et al., Proc Natl Acad Sci |
| | | | cells). | USA 85: 6342-6346 (1988); McGuire and Iacobelli, J Immunol 159(3): 1319-1327 (1997); Parra et al., J |
| | | | | Immunol 166(4): 2437-2443 (2001); and Butscher et al., J Biol Chem 3(1): 552-560 (1998), the contents |
| | | | | of each of which are herein incorporated by reference in its entirety. T cells that may be used according |
| | | | | to these assays are publicly available (e.g., through the ATCC). Exemplary human T cells that may be |
| | | | | used according to these assays include the JURKAT cell line, which is a suspension culture of leukemia |
| | | | | cells that produce IL-2 when stimulated. |
| 160 | HTAEE28 | 459 | Protection from | Caspase Apoptosis Rescue. Assays for caspase apoptosis rescue are well known in the art and may be |
| | | | Endothelial Cell | used or routinely modified to assess the ability of the polypeptides of the invention (including antibodies |
| | | | Apoptosis. | and agonists or antagonists of the invention) to inhibit caspase protease-mediated apoptosis. Exemplary |
| | | | | assays for caspase apoptosis that may be used or routinely modified to test caspase apoptosis rescue of |
| | | | | polypeptides of the invention (including antibodies and agonists or antagonists of the invention) include |
| | | | | the assays disclosed in Romeo et al., Cardiovasc Res 45(3): 788-794 (2000); Messmer et al., Br J |
| | | | | Pharmacol 127(7): 1633-1640 (1999); and J Atheroscler Thromb 3(2): 75-80 (1996); the contents of each |
| | | | | of which are herein incorporated by reference in its entirety. Endothelial cells that may be used |
| | | | | according to these assays are publicly available (e.g., through commercial sources). Exemplary |
| | | | | endothelial cells that may be used according to these assays include bovine aortic endothelial cells |
| | | | | (bAEC), which are an example of endothelial cells which line blood vessels and are involved in functions |
| | | | | that include, but are not limited to, angiogenesis, vascular permeability, vascular tone, and immune cell extravasation. |
| 160 | HTAEE28 | 459 | Insulin | Assays for measuring secretion of insulin are well-known in the art and may be used or routinely |
| | | | Secretion | modified to assess the ability of polypeptides of the invention (including antibodies and agonists or |
| | | | | antagonists of the invention) to stimulate insulin secretion. For example, insulin secretion is measured by |
| | | | | FMAT using anti-rat insulin antibodies. Insulin secretion from pancreatic beta cells is upregulated by |
| | | | | glucose and also by certain proteins/peptides, and disregulation is a key component in diabetes. |
| | | | | Exemplary assays that may be used or routinely modified to test for stimulation of insulin secretion (from |
| | | | | pancreatic cells) by polypeptides of the invention (including antibodies and agonists or antagonists of the |
| | | | | invention) include assays disclosed in: Shimizu, H., et al., Endocr J, 47(3): 261-9 (2000); Salapatek, A. M., |
| | | | | et al., Mol Endocrinol, 13(8): 1305-17 (1999); Filipsson, K., et al., Ann N Y Acad Sci, 865: 441-4 |
| | | | | (1998); Olson, L. K., et al., J Biol Chem, 271(28): 16544-52 (1996); and, Miraglia S et. al., Journal of |
| | | | | Biomolecular Screening, 4: 193-204 (1999), the contents of each of which is herein incorporated by |
| | | | | reference in its entirety. Pancreatic cells that may be used according to these assays are publicly |
| | | | | available (e.g., through the ATCC) and/or may be routinely generated. Exemplary pancreatic cells that |
| | | | | may be used according to these assays include HITT15 Cells. HITT15 are an adherent epithelial cell line |
| | | | | established from Syrian hamster islet cells transformed with SV40. These cells express glucagon, |
| | | | | somatostatin, and glucocorticoid receptors. The cells secrete insulin, which is stimulated by glucose and |
| | | | | glucagon and suppressed by somatostatin or glucocorticoids. ATTC# CRL-1777 Refs: Lord and |
| | | | | Ashcroft. Biochem. J. 219: 547-551; Santerre et al. Proc. Natl. Acad. Sci. USA 78: 4339-4343, 1981. |
| 161 | HTECC05 | 460 | Regulation of | Assays for the regulation of viability and proliferation of cells in vitro are well-known in the art and may |
| | | | viability and | be used or routinely modified to assess the ability of polypeptides of the invention (including antibodies |
| | | | proliferation of | and agonists or antagonists of the invention) to regulate viability and proliferation of pancreatic beta |
| | | | pancreatic beta | cells. For example, the Cell Titer-Glo luminescent cell viability assay measures the number of viable |
| | | | cells. | cells in culture based on quantitation of the ATP present which signals the presence of metabolically |
| | | | | active cells. Exemplary assays that may be used or routinely modified to test regulation of viability and |
| | | | | proliferation of pancreatic beta cells by polypeptides of the invention (including antibodies and agonists |
| | | | | or antagonists of the invention) include assays disclosed in: Friedrichsen BN, et al., Mol Eudocrinol, |
| | | | | 15(1): 136-48 (2001); Huotari MA, et al., Endocrinology, 139(4): 1494-9 (1998); Hugl SR. et at., J Biol |
| | | | | Chem 1998 Jul 10; 273(28): 17771-9 (1998), the contents of each of which is herein incorporated by |
| | | | | reference in its entirety. Pancreatic cells that may be used according to these assays are publicly |
| | | | | available (e.g., through the ATCC) and/or may be routinely generated. Exemplary pancreatic cells that |
| | | | | may be used according to these assays include rat INS-1 cells. INS-1 cells are a semi-adherent cell line |
| | | | | established from cells isolated from an X-ray induced rat transplantable insulinoma. These cells retain |
| | | | | characteristics typical of native pancreatic beta cells including glucose inducible insulin secretion. |
| | | | | References: Asfari et al. Endocrinology 1992 130: 167. |
| 162 | HTEEB42 | 461 | Regulation of | Assays for the regulation of transcription of Malic Enzyme are well-known in the art and may be used or |
| | | | transcription of | routinely modified to assess the ability of polypeptides of the invention (including antibodies and |
| | | | Malic Enzyme | agonists or antagonists of the invention) to regulate transcription of Malic Enzyme, a key enzyme in |
| | | | in hepatocytes | lipogenesis. Malic enzyme is involved in lipogenesisand its expression is stimulted by insulin. ME |
| | | | | promoter contains two direct repeat (DR1)-like elements MEp and MEd identified as putative PPAR |
| | | | | response elements. ME promoter may also responds to AP1 and other transcription factors. Exemplary |
| | | | | assays that may be used or routinely modified to test for regulation of transcription of Malic Enzyme (in |
| | | | | hepatocytes) by polypeptides of the invention (including antibodies and agonists or antagonists of the |
| | | | | invention) include assays disclosed in: Streeper, R. S., et al., Mol Endocrinol, 12(11): 1778-91 (1998); |
| | | | | Garcia-Jimenez, C., et al., Mol Endocrinol, 8(10): 1361-9 (1994); Barroso, I., et al., J Biol Chem, |
| | | | | 274(25): 17997-8004 (1999); Ijpenberg, A., et al., J Biol Chem, 272(32): 20108-20117 (1997); Berger, et |
| | | | | al., Gene 66: 1-10 (1988); and, Cullen, B., et al., Methods in Enzymol. 216: 362-368 (1992), the contents |
| | | | | of each of which is herein incorporated by reference in its entirety. Hepatocytes that may be used |
| | | | | according to these assays are publicly available (e.g., through the ATCC) and/or may be routinely |
| | | | | generated. Exemplary hepatocytes that may be used according to these assays includes the mouse 3T3- |
| | | | | L1 cell line. 3T3-L1 is a mouse preadipocyte cell line (adherent). It is a continuous substrain of 3T3 |
| | | | | fibroblasts developed through clonal isolation. Cells undergo a pre-adipocyte to adipose-like conversion |
| | | | | under appropriate differentiation culture conditions. |
| 163 | HTEFU65 | 462 | Activation of | Assays for the activation of transcription through the cAMP response element are well-known in the art |
| | | | transcription | and may be used or routinely modified to assess the ability of polypeptides of the invention (including |
| | | | through cAMP | antibodies and agonists or antagonists of the invention) to increase cAMP, regulate CREB transcription |
| | | | response | factors, and modulate expression of genes involved in a wide variety of cell functions. For example, a |
| | | | element (CRE) | 3T3-L1/CRE reporter assay may be used to identify factors that activate the cAMP signaling pathway. |
| | | | in pre- | CREB plays a major role in adipogenesis, and is involved in differentiation into adipocytes. CRE |
| | | | adipocytes. | contains the binding sequence for the transcription factor CREB (CRE binding protein). Exemplary |
| | | | | assays for transcription through the cAMP response element that may be used or routinely modified to |
| | | | | test cAMP-response element activity of polypeptides of the invention (including antibodies and agonists |
| | | | | or antagonists of the invention) include assays disclosed in Berger et al., Gene 66: 1-10 (1998); Cullen |
| | | | | and Malm, Methods in Enzymol 216: 362-368 (1992); Henthorn et al., Proc Natl Acad Sci USA 85: 6342-6346 |
| | | | | (1988); Reusch et al., Mol Cell Biol 20(3): 1008-1020 (2000); and Klemm et al., J Biol Chem |
| | | | | 273: 917-923 (1998), the contents of each of which are herein incorporated by reference in its entirety. |
| | | | | Pre-adipocytes that may be used according to these assays are publicly available (e.g., through the |
| | | | | ATCC) and/or may be routinely generated. Exemplary mouse adipocyte cells that may be used according |
| | | | | to these assays include 3T3-L1 cells. 3T3-L1 is an adherent mouse preadipocyte cell line that is a |
| | | | | continuous substrain of 3T3 fibroblast cells developed through clonal isolation and undergo a pre- |
| | | | | adipocyte to adipose-like conversion under appropriate differentiation conditions known in the art. |
| 163 | HTEFU65 | 462 | Regulation of | Assays for the regulation of transcription of Malic Enzyme are well-known in the art and may be used or |
| | | | transcription of | routinely modified to assess the ability of polypeptides of the invention (including antibodies and |
| | | | Malic Enzyme | agonists or antagonists of the invention) to regulate transcription of Malic Enzyme, a key enzyme in |
| | | | in hepatocytes | lipogenesis. Malic enzyme is involved in lipogenesisand its expression is stimulted by insulin. ME |
| | | | | promoter contains two direct repeat (DR1)-like elements MEp and MEd identified as putative PPAR |
| | | | | response elements. ME promoter may also responds to AP1 and other transcription factors. Exemplary |
| | | | | assays that may be used or routinely modified to test for regulation of transcription of Malic Enzyme (in |
| | | | | hepatocytes) by polypeptides of the invention (including antibodies and agonists or antagonists of the |
| | | | | invention) include assays disclosed in: Streeper, R. S., et al., Mol Endocrinol, 12(11): 1778-91 (1998); |
| | | | | Garcia-Jimenez, C., et al., Mol Endocrinol, 8(10): 1361-9 (1994); Barroso, I., et al., J Biol Chem, |
| | | | | 274(25): 17997-8004 (1999); Ijpenberg, A., et al., J Biol Chem, 272(32): 20108-20117 (1997); Berger, et |
| | | | | al., Gene 66: 1-10 (1988); and, Cullen, B., et al., Methods in Enzymol. 216: 362-368 (1992), the contents |
| | | | | of each of which is herein incorporated by reference in its entirety. Hepatocytes that may be used |
| | | | | according to these assays are publicly available (e.g., through the ATCC) and/or may be routinely |
| | | | | generated. Exemplary hepatocytes that may be used according to these assays includes the mouse 3T3- |
| | | | | L1 cell line. 3T3-L1 is a mouse preadipocyte cell line (adherent). It is a continuous substrain of 3T3 |
| | | | | fibroblasts developed through clonal isolation. Cells undergo a pre-adipocyte to adipose-like conversion |
| | | | | under appropriate differentiation culture conditions. |
| 163 | HTEFU65 | 462 | Myoblast cell | Assays for muscle cell proliferation are well known in the art and may be used or routinely modified to |
| | | | proliferation | assess the ability of polypeptides of the invention (including antibodies and agonists or antagonists of the |
| | | | | invention) to stimulate or inhibit myoblast cell proliferation. Exemplary assays for myoblast cell |
| | | | | proliferation that may be used or routinely modified to test activity of polypeptides and antibodies of the |
| | | | | invention (including agonists or antagonists of the invention) include, for example, assays disclosed in: |
| | | | | Soeta, C., et al. “Possible role for the c-ski gene in the proliferation of myogenic cells in regenerating |
| | | | | skeletal muscles of rats” Dev Growth Differ Apr; 43(2): 155-64 (2001); Ewton DZ, et al., “IGF binding |
| | | | | proteins-4, -5 and -6 may play specialized roles during L6 myoblast proliferation and differentiation” J |
| | | | | Endocrinol Mar; 144(3): 539-53 (1995); and, Pampusch MS, et al.,“Effect of transforming growth factor |
| | | | | beta on proliferation of L6 and embryonic porcine myogenic cells” J Cell Physiol Jun; 143(3): 524-8 |
| | | | | (1990); the contents of each of which are herein incorporated by reference in their entirety. Exemplary |
| | | | | myoblast cells that may be used according to these assays include the rat myoblast L6 cell line. Rat |
| | | | | myoblast L6 cells are an adherent rat myoblast cell line, isolated from primary cultures of rat thigh |
| | | | | muscle, that fuse to form multinucleated myotubes and striated fibers after culture in differentiation media. |
| 163 | HTEFU65 | 462 | Production of | IFNgamma FMAT. IFNg plays a central role in the immune system and is considered to be a |
| | | | IFNgamma | proinflammatory cytokine. IFNg promotes TH1 and inhibits TH2 differentiation; promotes IgG2a and |
| | | | using a T cells | inhibits IgE secretion; induces macrophage activation; and increases MHC expression. Assays for |
| | | | | immunomodulatory proteins produced by T cells and NK cells that regulate a variety of inflammatory |
| | | | | activities and inhibit TH2 helper cell functions are well known in the art and may be used or routinely |
| | | | | modified to assess the ability of polypeptides of the invention (including antibodies and agonists or |
| | | | | antagonists of the invention) to mediate immunomodulation, regulate inflammatory activities, modulate |
| | | | | TH2 helper cell function, and/or mediate humoral or cell-mediated immunity. Exemplary assays that test |
| | | | | for immunomodulatory proteins evaluate the production of cytokines, such as Interferon gamma. (IFNg), |
| | | | | and the activation of T cells. Such assays that may be used or routinely modified to test |
| | | | | immunomodulatory activity of polypeptides of the invention (including antibodies and agonists or |
| | | | | antagonists of the invention) include the assays disclosed in Miraglia et al., J Biomolecular Screening |
| | | | | 4: 193-204 (1999); Rowland et al., “Lymphocytes: a practical approach” Chapter 6: 138-160 (2000); |
| | | | | Gonzalez et al., J Clin Lab Anal 8(5): 225-233 (1995); Billiau et al., Ann NY Acad Sci 856: 22-32 (1998); |
| | | | | Boehm et al., Annu Rev Immunol 15: 749-795 (1997), and Rheumatology (Oxford) 38(3): 214-20 (1999), |
| | | | | the contents of each of which are herein incorporated by reference in its entirety. Human T cells that may |
| | | | | be used according to these assays may be isolated using techniques disclosed herein or otherwise known |
| | | | | in the art. Human T cells are primary human lymphocytes that mature in the thymus and express a T Cell |
| | | | | receptor and CD3, CD4, or CD8. These cells mediate humoral or cell-mediated immunity and may be |
| | | | | preactivated to enhance responsiveness to immunomodulatory factors. |
| 163 | HTEFU65 | 462 | Stimulation of | Assays for measuring secretion of insulin are well-known in the art and may be used or routinely |
| | | | insulin secretion | modified to assess the ability of polypeptides of the invention (including antibodies and agonists or |
| | | | from pancreatic | antagonists of the invention) to stimulate insulin secretion. For example, insulin secretion is measured by |
| | | | beta cells. | FMAT using anti-rat insulin antibodies. Insulin secretion from pancreatic beta cells is upregulated by |
| | | | | glucose and also by certain proteins/peptides, and disregulation is a key component in diabetes. |
| | | | | Exemplary assays that may be used or routinely modified to test for stimulation of insulin secretion (from |
| | | | | pancreatic cells) by polypeptides of the invention (including antibodies and agonists or antagonists of the |
| | | | | invention) include assays disclosed in: Ahren, B., et al., Am J Physiol, 277(4 Pt 2): R959-66 (1999); Li, M., |
| | | | | et al., Endocrinology, 138(9): 3735-40 (1997); Kim, K. H., et al., FEBS Lett, 377(2): 237-9 (1995); |
| | | | | and, Miraglia S et. al., Journal of Biomolecular Screening, 4: 193-204 (1999), the contents of each of |
| | | | | which is herein incorporated by reference in its entirety. Pancreatic cells that may be used according to |
| | | | | these assays are publicly available (e.g., through the ATCC) and/or may be routinely generated. |
| | | | | Exemplary pancreatic cells that may be used according to these assays include rat INS-1 cells. INS-1 |
| | | | | cells are a semi-adherent cell line established from cells isolated from an X-ray induced rat transplantable |
| | | | | insulinoma. These cells retain characteristics typical of native pancreatic beta cells including glucose |
| | | | | inducible insulin secretion. References: Asfari et al. Endocrinology 1992 130: 167. |
| 164 | HTELP17 | 463 | Regulation of | Assays for the regulation of transcription through the PEPCK promoter are well-known in the art and |
| | | | transcription | may be used or routinely modified to assess the ability of polypeptides of the invention(including |
| | | | through the | antibodies and agonists or antagonists of the invention) to activate the PEPCK promoter in a reporter |
| | | | PEPCK | construct and regulate liver gluconeogenesis. Exemplary assays for regulation of transcription through |
| | | | promoter in | the PEPCK promoter that may be used or routinely modified to test for PEPCK promoter activity (in |
| | | | hepatocytes | hepatocytes) of polypeptides of the invention (including antibodies and agonists or antagonists of the |
| | | | | invention) include assays disclosed in Berger et al., Gene 66: 1-10 (1998); Cullen and Malm, Methods in |
| | | | | Enzymol 216: 362-368 (1992); Henthorn et al., Proc Natl Acad Sci USA 85: 6342-6346 (1988); Lochhead |
| | | | | et al., Diabetes 49(6): 896-903 (2000); and Yeagley et al., J Biol Chem 275(23): 17814-17820 (2000), the |
| | | | | contents of each of which is herein incorporated by reference in its entirety. Hepatocyte cells that may be |
| | | | | used according to these assays are publicly available (e.g., through the ATCC) and/or may be routinely |
| | | | | generated. Exemplary liver hepatoma cells that may be used according to these assays include H4lle |
| | | | | cells, which contain a tyrosine amino transferase that is inducible with glucocorticoids, insulin, or cAMP derivatives. |
| 164 | HTELP17 | 463 | Stimulation of | Assays for measuring calcium flux are well-known in the art and may be used or routinely modified to |
| | | | Calcium Flux in | assess the ability of polypeptides of the invention (including antibodies and agonists or antagonists of the |
| | | | pancreatic beta | invention) to mobilize calcium. For example, the FLPR assay may be used to measure influx of calcium. |
| | | | cells. | Cells normally have very low concentrations of cytosolic calcium compared to much higher extracellular |
| | | | | calcium. Extracellular factors can cause an influx of calcium, leading to activation of calcium responsive |
| | | | | signaling pathways and alterations in cell functions. Exemplary assays that may be used or routinely |
| | | | | modified to measure calcium flux by polypeptides of the invention (including antibodies and agonists or |
| | | | | antagonists of the invention) include assays disclosed in: Satin LS, et al., Endocrinology, 136(10): 4589-601 |
| | | | | (1995); Mogami H, et al., Endocrinology, 136(7): 2960-6 (1995); Richardson SB, et al., Biochem J, |
| | | | | 288 (Pt 3): 847-51 (1992); and, Meats, JE, et al., Cell Calcium 1989 Nov-Dec; 10(8): 535-41 (1989), the |
| | | | | contents of each of which is herein incorporated by reference in its entirety. Pancreatic cells that may be |
| | | | | used according to these assays are publicly available (e.g., through the ATCC) and/or may be routinely |
| | | | | generated. Exemplary pancreatic cells that may be used according to these assays include HITT15 Cells. |
| | | | | HITT15 are an adherent epithelial cell line established from Syrian hamster islet cells transformed with |
| | | | | SV40. These cells express glucagon, somatostatin, and glucocorticoid receptors. The cells secrete |
| | | | | insulin, which is stimulated by glucose and glucagon and suppressed by somatostatin or glucocorticoids. |
| | | | | ATTC# CRL-1777 Refs: Lord and Ashcroft. Biochem. J. 219: 547-551; Santerre et al. Proc. Natl. |
| | | | | Acad. Sci. USA 78: 4339-4343, 1981. |
| 165 | HTELS08 | 464 | Regulation of | Assays for the regulation of transcription through the PEPCK promoter are well-known in the art and |
| | | | transcription | may be used or routinely modified to assess the ability of polypeptides of the invention (including |
| | | | through the | antibodies and agonists or antagonists of the invention) to activate the PEPCK promoter in a reporter |
| | | | PEPCK | construct and regulate liver gluconeogenesis. Exemplary assays for regulation of transcription through |
| | | | promoter in | the PEPCK promoter that may be used or routinely modified to test for PEPCK promoter activity (in |
| | | | hepatocytes | hepatocytes) of polypeptides of the invention (including antibodies and agonists or antagonists of the |
| | | | | invention) include assays disclosed in Berger et al., Gene 66: 1-10 (1998); Cullen and Malm, Methods in |
| | | | | Enzymol 216: 362-368 (1992); Henthorn et al., Proc Natl Acad Sci USA 85: 6342-6346 (1988); Lochhead |
| | | | | et al., Diabetes 49(6): 896-903 (2000); and Yeagley et al., J Biol Chem 275(23): 17814-17820 (2000), the |
| | | | | contents of each of which is herein incorporated by reference in its entirety. Hepatocyte cells that may be |
| | | | | used according to these assays are publicly available (e.g., through the ATCC) and/or may be routinely |
| | | | | generated. Exemplary liver hepatoma cells that may be used according to these assays include H4lle |
| | | | | cells, which contain a tyrosine amino transferase that is inducible with glucocorticoids, insulin, or cAMP derivatives. |
| 166 | HTLEP53 | 465 | Endothelial Cell | Caspase Apoptosis. Assays for caspase apoptosis are well known in the art and may be used or routinely |
| | | | Apoptosis | modified to assess the ability of polypeptides of the invention (including antibodies and agonists or |
| | | | | antagonists of the invention) to promote caspase protease-mediated apoptosis. Induction of apoptosis in |
| | | | | endothelial cells supporting the vasculature of tumors is associated with tumor regression due to loss of |
| | | | | tumor blood supply. Exemplary assays for caspase apoptosis that may be used or routinely modified to |
| | | | | test capase apoptosis activity of polypeptides of the invention (including antibodies and agonists or |
| | | | | antagonists of the invention) include the assays disclosed in Lee et al., FEBS Lett 485(2-3): 122-126 |
| | | | | (2000); Nor et al., J Vasc Res 37(3): 209-218 (2000); and Karsan and Harlan, J Atheroscler Thromb 3(2): |
| | | | | 75-80 (1996); the contents of each of which are herein incorporated by reference in its entirety. |
| | | | | Endothelial cells that may be used according to these assays are publicly available (e.g., through |
| | | | | commercial sources). Exemplary endothelial cells that may be used according to these assays include |
| | | | | bovine aortic endothelial cells (bAEC), which are an example of endothelial cells which line blood |
| | | | | vessels and are involved in functions that include, but are not limited to, angiogenesis, vascular |
| | | | | permeability, vascular tone, and immune cell extravasation. |
| 166 | HTLEP53 | 465 | Insulin | Assays for measuring secretion of insulin are well-known in the art and may be used or routinely |
| | | | Secretion | modified to assess the ability of polypeptides of the invention (including antibodies and agonists or |
| | | | | antagonists of the invention) to stimulate insulin secretion. For example, insulin secretion is measured by |
| | | | | FMAT using anti-rat insulin antibodies. Insulin secretion from pancreatic beta cells is upregulated by |
| | | | | glucose and also by certain proteins/peptides, and disregulation is a key component in diabetes. |
| | | | | Exemplary assays that may be used or routinely modified to test for stimulation of insulin secretion (from |
| | | | | pancreatic cells) by polypeptides of the invention (including antibodies and agonists or antagonists of the |
| | | | | invention) include assays disclosed in: Shimizu, H., et al., Endocr J, 47(3): 261-9 (2000); Salapatek, A. M., |
| | | | | et al., Mol Endocrinol, 13(8): 1305-17 (1999); Filipsson, K., et al., Ann N Y Acad Sci, 865: 441-4 |
| | | | | (1998); Olson, L. K., et al., J Biol Chem, 271(28): 16544-52 (1996); and, Miraglia S et. al., Journal of |
| | | | | Biomolecular Screening, 4: 193-204 (1999), the contents of each of which is herein incorporated by |
| | | | | reference in its entirety. Pancreatic cells that may be used according to these assays are publicly |
| | | | | available (e.g., through the ATCC) and/or may be routinely generated. Exemplary pancreatic cells that |
| | | | | may be used according to these assays include HITT15 Cells. HITT15 are an adherent epithelial cell line |
| | | | | established from Syrian hamster islet cells transformed with SV40. These cells express glucagon, |
| | | | | somatostatin, and glucocorticoid receptors. The cells secrete insulin, which is stimulated by glucose and |
| | | | | glucagon and suppressed by somatostatin or glucocorticoids. ATTC# CRL-1777 Refs: Lord and |
| | | | | Ashcroft. Biochem. J. 219: 547-551; Santerre et al. Proc. Natl. Acad. Sci. USA 78: 4339-4343, 1981. |
| 167 | HTPCS72 | 466 | Stimulation of | Assays for measuring calcium flux are well-known in the art and may be used or routinely modified to |
| | | | Calcium Flux in | assess the ability of polypeptides of the invention (including antibodies and agonists or antagonists of the |
| | | | pancreatic beta | invention) to mobilize calcium. For example, the FLPR assay may be used to measure influx of calcium. |
| | | | cells. | Cells normally have very low concentrations of cytosolic calcium compared to much higher extracellular |
| | | | | calcium. Extracellular factors can cause an influx of calcium, leading to activation of calcium responsive |
| | | | | signaling pathways and alterations in cell functions. Exemplary assays that may be used or routinely |
| | | | | modified to measure calcium flux by polypeptides of the invention (including antibodies and agonists or |
| | | | | antagonists of the invention) include assays disclosed in: Satin LS, et al., Endocrinology, 136(10): 4589-601 |
| | | | | (1995); Mogami H, et al., Endocrinology, 136(7): 2960-6 (1995); Richardson SB, et al., Biochem J, |
| | | | | 288 (Pt 3): 847-51 (1992); and, Meats, JE, et al., Cell Calcium 1989 Nov-Dec; 10(8): 535-41 (1989), the |
| | | | | contents of each of which is herein incorporated by reference in its entirety. Pancreatic cells that may be |
| | | | | used according to these assays are publicly available (e.g., through the ATCC) and/or may be routinely |
| | | | | generated. Exemplary pancreatic cells that may be used according to these assays include HITT15 Cells. |
| | | | | HITT15 are an adherent epithelial cell line established from Syrian hamster islet cells transformed with |
| | | | | SV40. These cells express glucagon, somatostatin, and glucocorticoid receptors. The cells secrete |
| | | | | insulin, which is stimulated by glucose and glucagon and suppressed by somatostatin or glucocorticoids. |
| | | | | ATTC# CRL-1777 Refs: Lord and Ashcroft. Biochem. J. 219: 547-551; Santerre et al. Proc. Natl. |
| | | | | Acad. Sci. USA 78: 4339-4343, 1981. |
| 168 | HTPIH83 | 467 | Insulin | Assays for measuring secretion of insulin are well-known in the art and may be used or routinely |
| | | | Secretion | modified to assess the ability of polypeptides of the invention (including antibodies and agonists or |
| | | | | antagonists of the invention) to stimulate insulin secretion. For example, insulin secretion is measured by |
| | | | | FMAT using anti-rat insulin antibodies. Insulin secretion from pancreatic beta cells is upregulated by |
| | | | | glucose and also by certain proteins/peptides, and disregulation is a key component in diabetes. |
| | | | | Exemplary assays that may be used or routinely modified to test for stimulation of insulin secretion (from |
| | | | | pancreatic cells) by polypeptides of the invention (including antibodies and agonists or antagonists of the |
| | | | | invention) include assays disclosed in: Shimizu, H., et al., Endocr J, 47(3): 261-9 (2000); Salapatek, A. M., |
| | | | | et al., Mol Endocrinol, 13(8): 1305-17 (1999); Filipsson, K., et al., Ann N Y Acad Sci, 865: 441-4 |
| | | | | (1998); Olson, L. K., et al., J Biol Chem, 271(28): 16544-52 (1996); and, Miraglia S et. al., Journal of |
| | | | | Biomolecular Screening, 4: 193-204 (1999), the contents of each of which is herein incorporated by |
| | | | | reference in its entirety. Pancreatic cells that may be used according to these assays are publicly |
| | | | | available (e.g., through the ATCC) and/or may be routinely generated. Exemplary pancreatic cells that |
| | | | | may be used according to these assays include HITT15 Cells. HITT15 are an adherent epithelial cell line |
| | | | | established from Syrian hamster islet cells transformed with SV40. These cells express glucagon, |
| | | | | somatostatin, and glucocorticoid receptors. The cells secrete insulin, which is stimulated by glucose and |
| | | | | glucagon and suppressed by somatostatin or glucocorticoids. ATTC# CRL-1777 Refs: Lord and |
| | | | | Ashcroft. Biochem. J. 219: 547-551; Santerre et al. Proc. Natl. Acad. Sci. USA 78: 4339-4343, 1981. |
| 169 | HTSEW17 | 468 | Stimulation of | Assays for measuring secretion of insulin are well-known in the art and may be used or routinely |
| | | | insulin secretion | modified to assess the ability of polypeptides of the invention (including antibodies and agonists or |
| | | | from pancreatic | antagonists of the invention) to stimulate insulin secretion. For example, insulin secretion is measured by |
| | | | beta cells. | FMAT using anti-rat insulin antibodies. Insulin secretion from pancreatic beta cells is upregulated by |
| | | | | glucose and also by certain proteins/peptides, and disregulation is a key component in diabetes. |
| | | | | Exemplary assays that may be used or routinely modified to test for stimulation of insulin secretion (from |
| | | | | pancreatic cells) by polypeptides of the invention (including antibodies and agonists or antagonists of the |
| | | | | invention) include assays disclosed in: Ahren, B., et al., Am J Physiol, 277(4 Pt 2): R959-66 (1999); Li, M., |
| | | | | et al., Endocrinology, 138(9): 3735-40 (1997); Kim, K. H., et al., FEBS Lett, 377(2): 237-9 (1995); |
| | | | | and, Miraglia S et. al., Journal of Biomolecular Screening, 4: 193-204 (1999), the contents of each of |
| | | | | which is herein incorporated by reference in its entirety. Pancreatic cells that may be used according to |
| | | | | these assays are publicly available (e.g., through the ATCC) and/or may be routinely generated. |
| | | | | Exemplary pancreatic cells that may be used according to these assays include rat INS-1 cells. INS-1 |
| | | | | cells are a semi-adherent cell line established from cells isolated from an X-ray induced rat transplantable |
| | | | | insulinoma. These cells retain characteristics typical of native pancreatic beta cells including glucose |
| | | | | inducible insulin secretion. References: Asfari et al. Endocrinology 1992 130: 167. |
| 169 | HTSEW17 | 468 | Activation of | Assays for the activation of transcription through the NFKB response element are well-known in the art |
| | | | transcription | and may be used or routinely modified to assess the ability of polypeptides of the invention (including |
| | | | through NFKB | antibodies and agonists or antagonists of the invention) to regulate NFKB transcription factors and |
| | | | response | modulate expression of immunomodulatory genes. Exemplary assays for transcription through the |
| | | | element in | NFKB response element that may be used or rountinely modified to test NFKB-response element activity |
| | | | immune cells | of polypeptides of the invention (including antibodies and agonists or antagonists of the invention) |
| | | | (such as B- | include assays disclosed in: Gri G, et al., Biol Chem, 273(11): 6431-6438 (1998); Pyatt DW, et al., Cell |
| | | | cells). | Biol Toxicol 2000; 16(1): 41-51 (2000); Berger et al., Gene 66: 1-10 (1998); Cullen and Malm, Methods in |
| | | | | Enzymol 216: 362-368 (1992); Henthorn et al., Proc Natl Acad Sci USA 85: 6342-6346 (1988); Valle |
| | | | | Blazquez et al., Immunology 90(3): 455-460 (1997); Aramburau et al., J Exp Med 82(3): 801-810 (1995); |
| | | | | and Fraser et al., 29(3): 838-844 (1999), the contents of each of which are herein incorporated by |
| | | | | reference in its entirety. Immune cells that may be used according to these assays are publicly available |
| | | | | (e.g., through the ATCC). Exemplary immune cells that may be used according to these assays include |
| | | | | the Reh B-cell line. |
| 170 | HTTBI76 | 469 | Stimulation of | Assays for measuring secretion of insulin are well-known in the art and may be used or routinely |
| | | | insulin secretion | modified to assess the ability of polypeptides of the invention (including antibodies and agonists or |
| | | | from pancreatic | antagonists of the invention) to stimulate insulin secretion. For example, insulin secretion is measured by |
| | | | beta cells. | FMAT using anti-rat insulin antibodies. Insulin secretion from pancreatic beta cells is upregulated by |
| | | | | glucose and also by certain proteins/peptides, and disregulation is a key component in diabetes. |
| | | | | Exemplary assays that may be used or routinely modified to test for stimulation of insulin secretion (from |
| | | | | pancreatic cells) by polypeptides of the invention (including antibodies and agonists or antagonists of the |
| | | | | invention) include assays disclosed in: Ahren, B., et al., Am J Physiol, 277(4 Pt 2): R959-66 (1999); Li, M., |
| | | | | et al., Endocrinology, 138(9): 3735-40 (1997); Kim, K. H., et al., FEBS Lett, 377(2): 237-9 (1995); |
| | | | | and, Miraglia S et. al., Journal of Biomolecular Screening, 4: 193-204 (1999), the contents of each of |
| | | | | which is herein incorporated by reference in its entirety. Pancreatic cells that may be used according to |
| | | | | these assays are publicly available (e.g., through the ATCC) and/or may be routinely generated. |
| | | | | Exemplary pancreatic cells that may be used according to these assays include rat INS-1 cells. INS-1 |
| | | | | cells are a semi-adherent cell line established from cells isolated from an X-ray induced rat transplantable |
| | | | | insulinoma. These cells retain characteristics typical of native pancreatic beta cells including glucose |
| | | | | inducible insulin secretion. References: Asfari et al. Endocrinology 1992 130: 167. |
| 170 | HTTBI76 | 469 | Upregulation of | CD69 FMAT. CD69 is an activation marker that is expressed on activated T cells, B cells, and NK cells. |
| | | | CD69 and | CD69 is not expressed on resting T cells, B cells, or NK cells. CD69 has been found to be associated with |
| | | | activation of T | inflammation. Assays for immunomodulatory proteins expressed in T cells, B cells, and leukocytes are |
| | | | cells | well known in the art and may be used or routinely modified to assess the ability of polypeptides of the |
| | | | | invention (including antibodies and agonists or antagonists of the invention) to modulate the activation of |
| | | | | T cells, and/or mediate humoral or cell-mediated immunity. Exemplary assays that test for |
| | | | | immunomodulatory proteins evaluate the upregulation of cell surface markers, such as CD69, and the |
| | | | | activation of T cells. Such assays that may be used or routinely modified to test immunomodulatory |
| | | | | activity of polypeptides of the invention (including antibodies and agonists or antagonists of the |
| | | | | invention) include, for example, the assays disclosed in Miraglia et al., J Biomolecular Screening 4: 193-204 |
| | | | | (1999); Rowland et al., “Lymphocytes: a practical approach” Chapter 6: 138-160 (2000); Ferenczi et |
| | | | | al., J Autoimmun 14(1): 63-78 (200); Werfel et al., Allergy 52(4): 465-469 (1997); Taylor-Fishwick and |
| | | | | Siegel, Eur J Immunol 25(12): 3215-3221 (1995); and Afetra et al., Ann Rheum Dis 52(6): 457-460 |
| | | | | (1993), the contents of each of which are herein incorporated by reference in its entirety. Human T cells |
| | | | | that may be used according to these assays may be isolated using techniques disclosed herein or |
| | | | | otherwise known in the art. Human T cells are primary human lymphocytes that mature in the thymus |
| | | | | and express a T Cell receptor and CD3, CD4, or CD8. These cells mediate humoral or cell-mediated |
| | | | | immunity and may be preactivated to enhance responsiveness to immunomodulatory factors. |
| 171 | HTTBS64 | 470 | Regulation of | Assays for the regulation of transcription of Malic Enzyme are well-known in the art and may be used or |
| | | | transcription of | routinely modified to assess the ability of polypeptides of the invention (including antibodies and |
| | | | Malic Enzyme | agonists or antagonists of the invention) to regulate transcription of Malic Enzyme, a key enzyme in |
| | | | in hepatocytes | lipogenesis. Malic enzyme is involved in lipogenesisand its expression is stimulted by insulin. ME |
| | | | | promoter contains two direct repeat (DR1)-like elements MEp and MEd identified as putative PPAR |
| | | | | response elements. ME promoter may also responds to AP1 and other transcription factors. Exemplary |
| | | | | assays that may be used or routinely modified to test for regulation of transcription of Malic Enzyme (in |
| | | | | hepatocytes) by polypeptides of the invention (including antibodies and agonists or antagonists of the |
| | | | | invention) include assays disclosed in: Streeper, R. S., et al., Mol Endocrinol, 12(11): 1778-91 (1998); |
| | | | | Garcia-Jimenez, C., et al., Mol Endocrinol, 8(10): 1361-9 (1994); Barroso, I., et al., J Biol Chem, |
| | | | | 274(25): 17997-8004 (1999); Ijpenberg, A., et al., J Biol Chem, 272(32): 20108-20117 (1997); Berger, et |
| | | | | al., Gene 66: 1-10 (1988); and, Cullen, B., et al., Methods in Enzymol. 216: 362-368 (1992), the contents |
| | | | | of each of which is herein incorporated by reference in its entirety. Hepatocytes that may be used |
| | | | | according to these assays are publicly available (e.g., through the ATCC) and/or may be routinely |
| | | | | generated. Exemplary hepatocytes that may be used according to these assays includes the mouse 3T3- |
| | | | | L1 cell line. 3T3-L1 is a mouse preadipocyte cell line (adherent). It is a continuous substrain of 3T3 |
| | | | | fibroblasts developed through clonal isolation. Cells undergo a pre-adipocyte to adipose-like conversion |
| | | | | under appropriate differentiation culture conditions. |
| 172 | HTXJM03 | 471 | Regulation of | Assays for the regulation of transcription of Malic Enzyme are well-known in the art and may be used or |
| | | | transcription of | routinely modified to assess the ability of polypeptides of the invention (including antibodies and |
| | | | Malic Enzyme | agonists or antagonists of the invention) to regulate transcription of Malic Enzyme, a key enzyme in |
| | | | in hepatocytes | lipogenesis. Malic enzyme is involved in lipogenesisand its expression is stimulted by insulin. ME |
| | | | | promoter contains two direct repeat (DR1)-like elements MEp and MEd identified as putative PPAR |
| | | | | response elements. ME promoter may also responds to AP1 and other transcription factors. Exemplary |
| | | | | assays that may be used or routinely modified to test for regulation of transcription of Malic Enzyme (in |
| | | | | hepatocytes) by polypeptides of the invention (including antibodies and agonists or antagonists of the |
| | | | | invention) include assays disclosed in: Streeper, R. S., et al., Mol Endocrinol, 12(11): 1778-91 (1998); |
| | | | | Garcia-Jimenez, C., et al., Mol Endocrinol, 8(10): 1361-9 (1994); Barroso, I., et al., J Biol Chem, |
| | | | | 274(25): 17997-8004 (1999); Ijpenberg, A., et al., J Biol Chem, 272(32): 20108-20117 (1997); Berger, et |
| | | | | al., Gene 66: 1-10 (1988); and, Cullen, B., et al., Methods in Enzymol. 216: 362-368 (1992), the contents |
| | | | | of each of which is herein incorporated by reference in its entirety. Hepatocytes that may be used |
| | | | | according to these assays are publicly available (e.g., through the ATCC) and/or may be routinely |
| | | | | generated. Exemplary hepatocytes that may be used according to these assays includes the mouse 3T3- |
| | | | | L1 cell line. 3T3-L1 is a mouse preadipocyte cell line (adherent). It is a continuous substrain of 3T3 |
| | | | | fibroblasts developed through clonal isolation. Cells undergo a pre-adipocyte to adipose-like conversion |
| | | | | under appropriate differentiation culture conditions. |
| 173 | HTXON32 | 472 | Insulin | Assays for measuring secretion of insulin are well-known in the art and may be used or routinely |
| | | | Secretion | modified to assess the ability of polypeptides of the invention (including antibodies and agonists or |
| | | | | antagonists of the invention) to stimulate insulin secretion. For example, insulin secretion is measured by |
| | | | | FMAT using anti-rat insulin antibodies. Insulin secretion from pancreatic beta cells is upregulated by |
| | | | | glucose and also by certain proteins/peptides, and disregulation is a key component in diabetes. |
| | | | | Exemplary assays that may be used or routinely modified to test for stimulation of insulin secretion (from |
| | | | | pancreatic cells) by polypeptides of the invention (including antibodies and agonists or antagonists of the |
| | | | | invention) include assays disclosed in: Shimizu, H., et al., Endocr J, 47(3): 261-9 (2000); Salapatek, A. M., |
| | | | | et al., Mol Endocrinol, 13(8): 1305-17 (1999); Filipsson, K., et at., Ann N Y Acad Sci, 865: 441-4 |
| | | | | (1998); Olson, L. K., et al., J Biol Chem, 271(28): 16544-52 (1996); and, Miraglia S et. al., Journal of |
| | | | | Biomolecular Screening, 4: 193-204 (1999), the contents of each of which is herein incorporated by |
| | | | | reference in its entirety. Pancreatic cells that may be used according to these assays are publicly |
| | | | | available (e.g., through the ATCC) and/or may be routinely generated. Exemplary pancreatic cells that |
| | | | | may be used according to these assays include HITT15 Cells. HITT15 are an adherent epithelial cell line |
| | | | | established from Syrian hamster islet cells transformed with SV40. These cells express glucagon, |
| | | | | somatostatin, and glucocorticoid receptors. The cells secrete insulin, which is stimulated by glucose and |
| | | | | glucagon and suppressed by somatostatin or glucocorticoids. ATTC# CRL-1777 Refs: Lord and |
| | | | | Ashcroft. Biochem. J. 219: 547-551; Santerre et al. Proc. Natl. Acad. Sci. USA 78: 4339-4343, 1981. |
| 174 | HUFCJ30 | 473 | Stimulation of | Assays for measuring secretion of insulin are well-known in the art and may be used or routinely |
| | | | insulin secretion | modified to assess the ability of polypeptides of the invention (including antibodies and agonists or |
| | | | from pancreatic | antagonists of the invention) to stimulate insulin secretion. For example, insulin secretion is measured by |
| | | | beta cells. | FMAT using anti-rat insulin antibodies. Insulin secretion from pancreatic beta cells is upregulated by |
| | | | | glucose and also by certain proteins/peptides, and disregulation is a key component in diabetes. |
| | | | | Exemplary assays that may be used or routinely modified to test for stimulation of insulin secretion (from |
| | | | | pancreatic cells) by polypeptides of the invention (including antibodies and agonists or antagonists of the |
| | | | | invention) include assays disclosed in: Ahren, B., et al., Am J Physiol, 277(4 Pt 2): R959-66 (1999); Li, M., |
| | | | | et al., Endocrinology, 138(9): 3735-40 (1997); Kim, K. H., et al., FEBS Lett, 377(2): 237-9 (1995); |
| | | | | and, Miraglia S et. al., Journal of Biomolecular Screening, 4: 193-204 (1999), the contents of each of |
| | | | | which is herein incorporated by reference in its entirety. Pancreatic cells that may be used according to |
| | | | | these assays are publicly availble (e.g., through the ATCC) and/or may be routinely generated. |
| | | | | Exemplary pancreatic cells that may be used according to these assays include rat INS-1 cells. INS-1 |
| | | | | cells are a semi-adherent cell line established from cells isolated from an X-ray induced rat transplantable |
| | | | | insulinoma. These cells retain characteristics typical of native pancreatic beta cells including glucose |
| | | | | inducible insulin secretion. References: Asfari et al. Endocrinology 1992 130: 167. |
| 175 | HUVEB53 | 474 | Regulation of | Caspase Apoptosis. Assays for caspase apoptosis are well known in the art and may be used or |
| | | | apoptosis in | routinely modified to assess the ability of polypeptides of the invention (including antibodies and |
| | | | pancreatic beta | agonists or antagonists of the invention) to promote caspase protease-mediated apoptosis. Apoptosis in |
| | | | cells. | pancreatic beta is associated with induction and progression of diabetes. Exemplary assays for caspase |
| | | | | apoptosis that may be used or routinely modified to test capase apoptosis activity of polypeptides of the |
| | | | | invention (including antibodies and agonists or antagonists of the invention) include the assays disclosed |
| | | | | in: Loweth, AC, et al., FEBS Lett, 400(3): 285-8 (1997); Saini, KS, et al., Biochem Mol Biol Int, |
| | | | | 39(6): 1229-36 (1996); Krautheim, A., et al., Br J Pharmacol, 129(4): 687-94 (2000); Chandra J, et al., |
| | | | | Diabetes, 50 Suppl 1: S44-7 (2001); Suk K, et al., J Immunol, 166(7): 4481-9 (2001); Tejedo J, et al., |
| | | | | FEBS Lett, 459(2): 238-43 (1999); Zhang, S., et at., FEBS Lett, 455(3): 315-20 (1999); Lee et al., FEBS |
| | | | | Lett 485(2-3): 122-126 (2000); Nor et al., J Vasc Res 37(3): 209-218 (2000); and Karsan and Harlan, J |
| | | | | Atheroscler Thromb 3(2): 75-80 (1996); the contents of each of which are herein incorporated by |
| | | | | reference in its entirety. Pancreatic cells that may be used according to these assays are publicly |
| | | | | available (e.g., through the ATCC) and/or may be routinely generated. Exemplary pancreatic cells that |
| | | | | may be used according to these assays include RIN-m. RIN-m is a rat adherent pancreatic beta cell |
| | | | | insulinoma cell line derived from a radiation induced transplantable rat islet cell tumor. The cells |
| | | | | produce and secrete islet polypeptide hormones, and produce insulin, somatostatin, and possibly |
| | | | | glucagon. ATTC: #CRL-2057 Chick et al. Proc. Natl. Acad. Sci. 1977 74: 628; AF et al. Proc. Natl. Acad. Sci. |
| | | | | 1980 77: 3519. |
| 176 | HWAAD63 | 475 | Regulation of | Assays for the regulation of transcription through the FAS promoter element are well-known in the art |
| | | | transcription | and may be used or routinely modified to assess the ability of polypeptides of the invention (including |
| | | | through the FAS | antibodies and agonists or antagonists of the invention) to activate the FAS promoter element in a |
| | | | promoter | reporter construct and to regulate transcription of FAS, a key enzyme for lipogenesis. FAS promoter is |
| | | | element in hepatocytes | regulated by many transcription factors including SREBP. Insulin increases FAS gene transcription in |
| | | | | livers of diabetic mice. This stimulation of transcription is also somewhat glucose dependent. |
| | | | | Exemplary assays that may be used or routinely modified to test for FAS promoter element activity (in |
| | | | | hepatocytes) by polypeptides of the invention (including antibodies and agonists or antagonists of the |
| | | | | invention) include assays disclosed in Xiong, S., et al., Proc Natl Acad Sci U.S.A., 97(8): 3948-53 (2000); |
| | | | | Roder, K., et al., Eur J Biochem, 260(3): 743-51 (1999); Oskouian B, et al., Biochem J, 317 (Pt 1): 257-65 |
| | | | | (1996); Berger, et al., Gene 66: 1-10 (1988); and, Cullen, B., et al., Methods in Enzymol. 216: 362-368 |
| | | | | (1992), the contents of each of which is herein incorporated by reference in its entirety. Hepatocytes that |
| | | | | may be used according to these assays, such as H4IIE cells, are publicly available (e.g., through the |
| | | | | ATCC) and/or may be routinely generated. Exemplary hepatocytes that may be used according to these |
| | | | | assays include rat liver hepatoma cell line(s) inducible with glucocorticoids, insulin, or cAMP derivatives. |
| 176 | HWAAD63 | 475 | Production of | Assays for measuring expression of VCAM are well-known in the art and may be used or routinely |
| | | | VCAM in | modified to assess the ability of polypeptides of the invention (including antibodies and agonists or |
| | | | endothelial cells | antagonists of the invention) to regulate VCAM expression. For example, FMAT may be used to meaure |
| | | | (such as human | the upregulation of cell surface VCAM-1 expresssion in endothelial cells. Endothelial cells are cells that |
| | | | umbilical vein | line blood vessels, and are involved in functions that include, but are not limited to, angiogenesis, |
| | | | endothelial cells | vascular permeability, vascular tone, and immune cell extravasation. Exemplary endothelial cells that |
| | | | (HUVEC)) | may be used according to these assays include human umbilical vein endothelial cells (HUVEC), which |
| | | | | are available from commercial sources. The expression of VCAM (CD106), a membrane-associated |
| | | | | protein, can be upregulated by cytokines or other factors, and contributes to the extravasation of |
| | | | | lymphocytes, leucocytes and other immune cells from blood vessels; thus VCAM expression plays a role |
| | | | | in promoting immune and inflammatory responses. |
| 176 | HWAAD63 | 475 | Production of | Assays for measuring expression of ICAM-1 are well-known in the art and may be used or routinely |
| | | | ICAM-1 | modified to assess the ability of polypeptides of the invention (including antibodies and agonists or |
| | | | | antagonists of the invention) to regulate ICAM-1 expression. Exemplary assays that may be used or |
| | | | | routinely modified to measure ICAM-1 expression include assays disclosed in: Takacs P, et al, FASEB J, |
| | | | | 15(2): 279-281 (2001); and, Miyamoto K, et al., Am J Pathol, 156(5): 1733-1739 (2000), the contents of |
| | | | | each of which is herein incorporated by reference in its entirety. Cells that may be used according to |
| | | | | these assays are publicly available (e.g., through the ATCC) and/or may be routinely generated. |
| | | | | Exemplary cells that may be used according to these assays include microvascular endothelial cells (MVEC). |
| 177 | HWADJ89 | 476 | Activation of | Assays for the activation of transcription through the Serum Response Element (SRE) are well-known in |
| | | | transcription | the art and may be used or routinely modified to assess the ability of polypeptides of the invention |
| | | | through serum | (including antibodies and agonists or antagonists of the invention) to regulate the serum response factors |
| | | | response | and modulate the expression of genes involved in growth. Exemplary assays for transcription through |
| | | | element in | the SRE that may be used or routinely modified to test SRE activity of the polypeptides of the invention |
| | | | immune cells | (including antibodies and agonists or antagonists of the invention) include assays disclosed in Berger et |
| | | | (such as T-cells). | al., Gene 66: 1-10 (1998); Cullen and Malm, Methods in Enzymol 216: 362-368 (1992); Henthorn et al., |
| | | | | Proc Natl Acad Sci USA 85: 6342-6346 (1988); and Black et al., Virus Genes 12(2): 105-117 (1997), the |
| | | | | content of each of which are herein incorporated by reference in its entirety. T cells that may be used |
| | | | | according to these assays are publicly available (e.g., through the ATCC). Exemplary mouse T cells that |
| | | | | may be used according to these assays include the CTLL cell line, which is an IL-2 dependent suspension |
| | | | | culture of T cells with cytotoxic activity. |
| 177 | HWADJ89 | 476 | Stimulation of | Assays for measuring secretion of insulin are well-known in the art and may be used or routinely |
| | | | insulin secretion | modified to assess the ability of polypeptides of the invention (including antibodies and agonists or |
| | | | from pancreatic | antagonists of the invention) to stimulate insulin secretion. For example, insulin secretion is measured by |
| | | | beta cells. | FMAT using anti-rat insulin antibodies. Insulin secretion from pancreatic beta cells is upregulated by |
| | | | | glucose and also by certain proteins/peptides, and disregulation is a key component in diabetes. |
| | | | | Exemplary assays that may be used or routinely modified to test for stimulation of insulin secretion (from |
| | | | | pancreatic cells) by polypeptides of the invention (including antibodies and agonists or antagonists of the |
| | | | | invention) include assays disclosed in: Ahren, B., et al., Am J Physiol, 277(4 Pt 2): R959-66 (1999); Li, M., |
| | | | | et al., Endocrinology, 138(9): 3735-40 (1997); Kim, K. H., et al., FEBS Lett, 377(2): 237-9 (1995); |
| | | | | and, Miraglia S et. al., Journal of Biomolecular Screening, 4: 193-204 (1999), the contents of each of |
| | | | | which is herein incorporated by reference in its entirety. Pancreatic cells that may be used according to |
| | | | | these assays are publicly available (e.g., through the ATCC) and/or may be routinely generated. |
| | | | | Exemplary pancreatic cells that may be used according to these assays include rat INS-1 cells. INS-1 |
| | | | | cells are a semi-adherent cell line established from cells isolated from an X-ray induced rat transplantable |
| | | | | insulinoma. These cells retain characteristics typical of native pancreatic beta cells including glucose |
| | | | | inducible insulin secretion. References: Asfari et al. Endocrinology 1992 130: 167. |
| 178 | HWBFX31 | 477 | Regulation of | Assays for the regulation of transcription of Malic Enzyme are well-known in the art and may be used or |
| | | | transcription of | routinely modified to assess the ability of polypeptides of the invention (including antibodies and |
| | | | Malic Enzyme | agonists or antagonists of the invention) to regulate transcription of Malic Enzyme, a key enzyme in |
| | | | in adipocytes | lipogenesis. Malic enzyme is involved in lipogenesisand its expression is stimulted by insulin. ME |
| | | | | promoter contains two direct repeat (DR1)- like elements MEp and MEd identified as putative PPAR |
| | | | | response elements. ME promoter may also responds to AP1 and other transcription factors. Exemplary |
| | | | | assays that may be used or routinely modified to test for regulation of transcription of Malic Enzyme (in |
| | | | | adipoocytes) by polypeptides of the invention (including antibodies and agonists or antagonists of the |
| | | | | invention) include assays disclosed in: Streeper, R. S., et al., Mol Endocrinol, 12(11): 1778-91 (1998); |
| | | | | Garcia-Jimenez, C., et al., Mol Endocrinol, 8(10): 1361-9 (1994); Barroso, I., et al., J Biol Chem, |
| | | | | 274(25): 17997-8004 (1999); Ijpenberg, A., et al., J Biol Chem, 272(32): 20108-20117 (1997); Berger, et |
| | | | | al., Gene 66: 1-10 (1988); and, Cullen, B., et al., Methods in Enzymol. 216: 362-368 (1992), the contents |
| | | | | of each of which is herein incorporated by reference in its entirety. Hepatocytes that may be used |
| | | | | according to these assays are publicly available (e.g., through the ATCC) and/or may be routinely |
| | | | | generated. Exemplary hepatocytes that may be used according to these assays includes the H4IIE rat |
| | | | | liver hepatoma cell line. |

[0132] Table 2 further characterizes certain encoded polypeptides of the invention, by providing the results of comparisons to protein and protein family databases. The first column provides a unique clone identifier, “Clone ID NO:”, corresponding to a cDNA clone disclosed in Table 1A and/or Table 1B. The second column provides the unique contig identifier, “Contig ID:” which allows correlation with the information in Table 1B. The third column provides the sequence identifier, “SEQ ID NO:”, for the contig polynucleotide sequences. The fourth column provides the analysis method by which the homology/identity disclosed in the Table was determined. The fifth column provides a description of the PFAM/NR hit identified by each analysis. Column six provides the accession number of the PFAM/NR hit disclosed in the fifth column. Column seven, score/percent identity, provides a quality score or the percent identity, of the hit disclosed in column five. Comparisons were made between polypeptides encoded by polynucleotides of the invention and a non-redundant protein database (herein referred to as “NR”), or a database of protein families (herein referred to as “PFAM”), as described below.

[0133] The NR database, which comprises the NBRF PIR database, the NCBI GenPept database, and the SIB SwissProt and TrEMBL databases, was made non-redundant using the computer program nrdb2 (Warren Gish, Washington University in Saint Louis). Each of the polynucleotides shown in Table 1B, column 3 (e.g., SEQ ID NO:X or the ‘Query’ sequence) was used to search against the NR database. The computer program BLASTX was used to compare a 6-frame translation of the Query sequence to the NR database (for information about the BLASTX algorithm please see Altshul et al., J. Mol. Biol. 215:403-410 (1990), and Gish and States, Nat. Genet. 3:266-272 (1993). A description of the sequence that is most similar to the Query sequence (the highest scoring ‘Subject’) is shown in column five of Table 2 and the database accession number for that sequence is provided in column six. The highest scoring ‘Subject’ is reported in Table 2 if (a) the estimated probability that the match occurred by chance alone is less than 1.0e-07, and (b) the match was not to a known repetitive element. BLASTX returns alignments of short polypeptide segments of the Query and Subject sequences which share a high degree of similarity; these segments are known as High-Scoring Segment Pairs or HSPs. Table 2 reports the degree of similarity between the Query and the Subject for each HSP as a percent identity in Column 7. The percent identity is determined by dividing the number of exact matches between the two aligned sequences in the HSP, dividing by the number of Query amino acids in the HSP and multiplying by 100. The polynucleotides of SEQ ID NO:X which encode the polypeptide sequence that generates an HSP are delineated by columns 8 and 9 of Table 2.

[0134] The PFAM database, PFAM version 2.1, (Sonnhammer, Nucl. Acids Res., 26:320-322, 1998))consists of a series of multiple sequence alignments; one alignment for each protein family. Each multiple sequence alignment is converted into a probability model called a Hidden Markov Model, or HMM, that represents the position-specific variation among the sequences that make up the multiple sequence alignment (see, e.g., Durbin, et al., Biological sequence analysis: probabilistic models of proteins and nucleic acids, Cambridge University Press, 1998 for the theory of HAMs). The program HMNMR version 1.8 (Sean Eddy, Washington University in Saint Louis) was used to compare the predicted protein sequence for each Query sequence (SEQ ID NO:Y in Table 1B.1) to each of the HMMs derived from PFAM version 2.1. A HMM derived from PFAM version 2.1 was said to be a significant match to a polypeptide of the invention if the score returned by HMMER 1.8 was greater than 0.8 times the HMMER 1.8 score obtained with the most distantly related known member of that protein family. The description of the PFAM family which shares a significant match with a polypeptide of the invention is listed in column 5 of Table 2, and the database accession number of the PFAM hit is provided in column 6. Column 7 provides the score returned by HMMER version 1.8 for the alignment. Columns 8 and 9 delineate the polynucleotides of SEQ ID NO:X which encode the polypeptide sequence which show a significant match to a PFAM protein family.

[0135] As mentioned, columns 8 and 9 in Table 2, “NT From”and “NT To”, delineate the polynucleotides of “SEQ ID NO:X” that encode a polypeptide having a significant match to the PFAM/NR database as disclosed in the fifth column. In one embodiment, the invention provides a protein comprising, or alternatively consisting of, a polypeptide encoded by the polynucleotides of SEQ ID NO:X delineated in columns 8 and 9 of Table 2. Also provided are polynucleotides encoding such proteins, and the complementary strand thereto.

[0136] The nucleotide sequence SEQ ID NO:X and the translated SEQ ID NO:Y are sufficiently accurate and otherwise suitable for a variety of uses well known in the art and described further below. For instance, the nucleotide sequences of SEQ ID NO:X are useful for designing nucleic acid hybridization probes that will detect nucleic acid sequences contained in SEQ ID NO:X or the cDNA contained in ATCC Deposit No:Z. These probes will also hybridize to nucleic acid molecules in biological samples, thereby enabling immediate applications in chromosome mapping, linkage analysis, tissue identification and/or typing, and a variety of forensic and diagnostic methods of the invention. Similarly, polypeptides identified from SEQ ID NO:Y may be used to generate antibodies which bind specifically to these polypeptides, or fragments thereof, and/or to the polypeptides encoded by the cDNA clones identified in, for example, Table 1A and/or 1B.

[0137] Nevertheless, DNA sequences generated by sequencing reactions can contain sequencing errors. The errors exist as misidentified nucleotides, or as insertions or deletions of nucleotides in the generated DNA sequence. The erroneously inserted or deleted nucleotides cause frame shifts in the reading frames of the predicted amino acid sequence. In these cases, the predicted amino acid sequence diverges from the actual amino acid sequence, even though the generated DNA sequence may be greater than 99.9% identical to the actual DNA sequence (for example, one base insertion or deletion in an open reading frame of over 1000 bases).

[0138] Accordingly, for those applications requiring precision in the nucleotide sequence or the amino acid sequence, the present invention provides not only the generated nucleotide sequence identified as SEQ ID NO:X, and a predicted translated amino acid sequence identified as SEQ ID NO:Y, but also a sample of plasmid DNA containing cDNA ATCC Deposit No:Z (e.g., as set forth in columns 2 and 3 of Table 1A and/or as set forth, for example, in Table 1B, 6, and 7). The nucleotide sequence of each deposited clone can readily be determined by sequencing the deposited clone in accordance with known methods. Further, techniques known in the art can be used to verify the nucleotide sequences of SEQ ID NO:X. The predicted amino acid sequence can then be verified from such deposits. Moreover, the amino acid sequence of the protein encoded by a particular clone can also be directly determined by peptide sequencing or by expressing the protein in a suitable host cell containing the deposited human cDNA, collecting the protein, and determining its sequence.

TABLE 2

| | | SEQ | | | | | | |
|---|---|---|---|---|---|---|---|---|
| | | ID | | | PFam/NR | Score/ | | |
| cDNA | Contig | NO: | Analysis | | Accession | Percent | NT | NT |
| Clone ID | ID: | X | Method | PFam/NR Description | Number | Identity | From | To |
| H2CBU83 | 884134 | 11 | WUblastx. | (Q9NYD1) G-PROTEIN-COUPLED RECEPTOR 48. | Q9NYD1 | 100% | 10 | 777 |
| | | | 64 | | | | | |
| HACBD91 | 637482 | 13 | WUblastx. | NADH dehydrogenase (ubiquinone) (EC 1.6.5.3) chain | pir\|JE0383\|JE0383 | 100% | 211 | 357 |
| | | | 64 | NDUFB4 - human | | 95% | 1306 | 1368 |
| HAGAQ26 | 561996 | 14 | WUblastx. | (Q9UKG4) NA+/SULFATE COTRANSPORTER SUT-1. | Q9UKG4 | 99% | 414 | 1001 |
| | | | 64 | | | 93% | 2 | 433 |
| HAJAN23 | 872551 | 191 | HMMER | PFAM: Carboxyl transferase domain | PF01039 | 126.6 | 294 | 617 |
| | | | 2.1.1 | | | | | |
| | | | WUblastx. | (Q9HCC0) NON-BIOTIN CONTAINING SUBUNIT OF | Q9HCC0 | 91% | 120 | 665 |
| | | | 64 | 3-METHYLCROTONYL-COA CARBOX | | 93% | 557 | 1807 |
| HAJBR69 | 638516 | 17 | WUblastx. | (Q9JIG5) UBIQUITIN SPECIFIC PROTEASE | Q9JIG5 | 69% | 677 | 48 |
| | | | 64 | (FRAGMENT). | | | | |
| HAMFE15 | 905695 | 18 | HMMER | PFAM: Diacylglycerol kinase catalytic domain (presumed) | PF00781 | 22.9 | 1807 | 1956 |
| | | | 2.1.1 | | | | | |
| | | | WUblastx. | (Q9NP48) PUTATIVE LIPID KINASE (CDNA FLJ10842 | Q9NP48 | 93% | 1495 | 2757 |
| | | | 64 | FIS, CLONE NT2RP4001343 | | | | |
| HAMFE15 | 823350 | 192 | blastx.2 | PUTATIVE LIPID KINASE (CDNA FLJ10842 FIS, | sp\|Q9NP48\| | 93% | 1503 | 2756 |
| | | | | CLONE NT2RP4001343). | Q9NP48 | | | |
| HAMGR28 | 892971 | 19 | WUblastx. | (AAH07438) Similar to RIKEN cDNA 2610511E22 gene. | AAH07438 | 100% | 59 | 823 |
| | | | 64 | | | | | |
| HAPOM49 | 769555 | 20 | WUblastx. | (Q9BZM1) GROUP XII SECRETED PHOSPHOLIPASE | Q9BZM1 | 99% | 251 | 817 |
| | | | 64 | A2. | | | | |
| HATBR65 | 635514 | 21 | WUblastx. | (Q9H728) CDNA: FLJ21463 FIS, CLONE COL04765. | Q9H728 | 70% | 750 | 610 |
| | | | 64 | | | 68% | 801 | 754 |
| HAUAI83 | 639009 | 22 | WUblastx. | (BAB27250) 13 days embryo liver cDNA, RIKEN full-le | BAB27250 | 88% | 160 | 399 |
| | | | 64 | | | 90% | 25 | 84 |
| | | | | | | 100% | 489 | 557 |
| HAUAI83 | 383592 | 195 | blastx.2 | (AF059620) My006 protein [Homo sapiens] | gb\|AAG43119.1\| | 100% | 406 | 723 |
| | | | | | AF059620_1 | | | |
| HBGBA69 | 709658 | 196 | WUblastx. | (AAH17488) Hypothetical 22.4 kDa protein (Fragment) | AAH17488 | 78% | 158 | 226 |
| | | | 64 | | | 100% | 211 | 780 |
| HBIAE26 | 514418 | 25 | WUblastx. | (AAK55521) PRO0764. | AAK55521 | 83% | 1009 | 974 |
| | | | 64 | | | 65% | 983 | 744 |
| HBINS58 | 1352386 | 26 | blastx.14 | (Q9D6W7) 2310047N01RIK PROTEIN. | Q9D6W7 | 82% | 255 | 578 |
| | | | | | | 64% | 177 | 251 |
| HBINS58 | 961712 | 197 | WUblastx. | (Q9D6W7) 2310047N01RIK PROTEIN. | Q9D6W7 | 78% | 191 | 589 |
| | | | 64 | | | | | |
| HBINS58 | 892924 | 198 | blastx.2 | (AF106518) sialomucin CD164 [Homo sapiens] | gb\|AAC82473.1\| | 33% | 241 | 576 |
| HCE2F54 | 634016 | 28 | HMMER | PFAM: Histone-like transcription factor (CBF/NF-Y) and | PF00808 | 19 | 868 | 1005 |
| | | | 2.1.1 | archaeal histone | | | | |
| | | | WUblastx. | (AAH07642) Unknown (protein for IMAGE: 3534358) (Fra | AAH07642 | 99% | 298 | 1122 |
| | | | 64 | | | | | |
| HCE3G69 | 728432 | 29 | WUblastx. | (Q9H0K7) HYPOTHETICAL 12.4 KDA PROTEIN | Q9H0K7 | 100% | 1294 | 1647 |
| | | | 64 | (UNKNOWN) (PROTEIN FOR MGC: 303 | | | | |
| HCE3G69 | 494346 | 199 | blastx.2 | (AL136758) hypothetical protein [Homo sapiens] | emb\|CAB66692.1\| | 100% | 1295 | 1648 |
| HCE5F43 | 612796 | 30 | WUblastx. | (Q9H8M7) CDNA FLJ13397 FIS, CLONE | Q9H8M7 | 100% | 9 | 53 |
| | | | 64 | PLACE1001351. | | 100% | 56 | 928 |
| HCEFB80 | 1143407 | 31 | WUblastx. | (Q96FR3) Unknown (protein for MGC: 18083). | Q96FR3 | 81% | 1785 | 1979 |
| | | | 64 | | | | | |
| HCEWE20 | 543370 | 32 | WUblastx. | (Q9P1J1) PRO1546. | Q9P1J1 | 76% | 501 | 551 |
| | | | 64 | | | 79% | 601 | 717 |
| HCGMD59 | 636078 | 33 | WUblastx. | catalase (EC 1.11.1.6) - Campylobacter jejuni | pir\|I40767\|I40767 | 97% | 296 | 186 |
| | | | 64 | | | | | |
| HCNSM70 | 637547 | 35 | HMMER | PFAM: Immunoglobulin domain | PF00047 | 32 | 224 | 481 |
| | | | 2.1.1 | | | | | |
| | | | WUblastx. | (O60487) EPITHELIAL V-LIKE ANTIGEN PRECURSOR | O60487 | 94% | 107 | 751 |
| | | | 64 | (EPITHELIAL V-LIKE ANTIG | | | | |
| HCNSM70 | 589445 | 203 | WUblastx. | (O60487) EPITHELIAL V-LIKE ANTIGEN PRECURSOR | O60487 | 100% | 161 | 409 |
| | | | 64 | (EPITHELIAL V-LIKE ANTIG | | 99% | 408 | 806 |
| HCWDS72 | 707833 | 37 | WUblastx. | conserved hypothetical protein PA1527 [imported] - | pir\|D83454\| | 77% | 318 | 4 |
| | | | 64 | Pseudomonas aeruginosa (strain PAO1) | D83454 | | | |
| HCWKC15 | 553621 | 38 | WUblastx. | (Q9NX85) CDNA FLJ20378 FIS, CLONE KAIA0536. | Q9NX85 | 77% | 538 | 419 |
| | | | 64 | | | 56% | 710 | 663 |
| | | | | | | 63% | 708 | 532 |
| HDHEB60 | 499233 | 39 | WUblastx. | (Q9Y5Y5) PEROXISOMAL BIOGENESIS FACTOR 16. | Q9Y5Y5 | 81% | 277 | 1284 |
| | | | 64 | | | | | |
| HDPBA28 | 1062783 | 40 | WUblastx. | (Q9UKY2) ADIPOCYTE-DERIVED LEUCINE | Q9UKY2 | 94% | 259 | 3081 |
| | | | 64 | AMINOPEPTIDASE. | | | | |
| HDPBA28 | 866429 | 204 | HMMER | PFAM: Peptidase family M1 | PF01433 | 613.6 | 228 | 1391 |
| | | | 2.1.1 | | | | | |
| | | | WUblastx. | (Q9UKY2) ADIPOCYTE-DERIVED LEUCINE | Q9UKY2 | 99% | 69 | 2891 |
| | | | 64 | AMINOPEPTIDASE. | | | | |
| HDPCL63 | 1019008 | 41 | WUblastx. | (Q9Y519) HYPOTHETICAL 42.3 KDA PROTEIN. | Q9Y519 | 99% | 14 | 835 |
| | | | 64 | | | | | |
| HDPCL63 | 847045 | 205 | WUblastx. | (Q9Y519) HYPOTHETICAL 42.3 KDA PROTEIN. | Q9Y519 | 97% | 2 | 730 |
| | | | 64 | | | | | |
| HDPGT01 | 771583 | 44 | WUblastx. | (Q9Y2B3) LCAT-LIKE PROTEIN (LLPL). | Q9Y2B3 | 100% | 8 | 262 |
| | | | 64 | | | 100% | 264 | 1244 |
| HDPJM30 | 879325 | 46 | WUblastx. | (O94759) LONG TRANSIENT RECEPTOR POTENTIAL | TRL2_HUMAN | 99% | 17 | 1633 |
| | | | 64 | CHANNEL 2 (LTRPC | | | | |
| HDPJM30 | 603517 | 207 | WUblastx. | (O94759) LONG TRANSIENT RECEPTOR POTENTIAL | TRL2_HUMAN | 89% | 416 | 1312 |
| | | | 64 | CHANNEL 2 (LTRPC | | 96% | 378 | 530 |
| | | | | | | 98% | 1 | 378 |
| HDPMM88 | 972734 | 47 | HMMER | PFAM: E1-E2 ATPase | PF00122 | 31 | 475 | 543 |
| | | | 2.1.1 | | | | | |
| | | | WUblastx. | (P98198) POTENTIAL PHOSPHOLIPID- | AT1D_HUMAN | 66% | 106 | 2907 |
| | | | 64 | TRANSPORTING ATPASE ID (EC | | 32% | 2917 | 2991 |
| HDPMM88 | 906121 | 208 | blastx.2 | (AF038007) FIC1 [Homo sapiens] | gb\|AAC63461.1\| | 62% | 3 | 467 |
| HDPMM88 | 874074 | 211 | blastx.2 | (AF038007) FIC1 [Homo sapiens] | gb\|AAC63461.1\| | 56% | 1023 | 13 |
| HDPOJ08 | 731863 | 48 | WUblastx. | (Q9H7X1) CDNA FLJ14153 FIS, CLONE | Q9H7X1 | 84% | 524 | 904 |
| | | | 64 | NT2RM1000092, WEAKLY SIMILAR TO MUL | | 30% | 315 | 479 |
| | | | | | | 99% | 12 | 524 |
| HDPPN86 | 1037893 | 49 | WUblastx. | (Q9BVN4) HYPOTHETICAL 59.4 KDA PROTEIN. | Q9BVN4 | 77% | 5063 | 5194 |
| | | | 64 | | | 100% | 919 | 1308 |
| | | | | | | 97% | 1942 | 2175 |
| | | | | | | 47% | 4983 | 5045 |
| | | | | | | 98% | 4611 | 4799 |
| HDPSB18 | 1043263 | 50 | WUblastx. | (Q9H5R3) CDNA: FLJ23147 FIS, CLONE LNG09295. | Q9H5R3 | 70% | 3363 | 3163 |
| | | | 64 | | | | | |
| HDPSH53 | 1309174 | 51 | WUblastx. | (Q9H257) CASPASE RECRUITMENT DOMAIN | Q9H257 | 79% | 1011 | 1184 |
| | | | 64 | PROTEIN 9. | | 100% | 262 | 426 |
| HDPSH53 | 1040056 | 218 | WUblastx. | (Q9H257) CASPASE RECRUITMENT DOMAIN | Q9H257 | 100% | 1131 | 1184 |
| | | | 64 | PROTEIN 9. | | 65% | 1010 | 1114 |
| | | | | | | 92% | 301 | 423 |
| HDPSP01 | 689129 | 220 | WUblastx. | (Q9BR97) UNKNOWN (PROTEIN FOR MGC: 10763). | Q9BR97 | 90% | 227 | 1114 |
| | | | 64 | | | 98% | 1078 | 1668 |
| | | | | | | 100% | 1664 | 1744 |
| HDPUW68 | 812737 | 54 | HMMER | PFAM: Immunoglobulin domain | PF00047 | 38.9 | 844 | 1005 |
| | | | 2.1.1 | | | | | |
| | | | WUblastx. | (Q9Y286) QA79 MEMBRANE PROTEIN, ALLELIC | Q9Y286 | 95% | 70 | 1440 |
| | | | 64 | VARIANT AIRM-1B PRECURSOR. | | | | |
| HDPXY01 | 879048 | 55 | WUblastx. | hypothetical protein DKFZp434A139.1 - human | pir\|T43490\| | 50% | 637 | 678 |
| | | | 64 | (fragments) | T43490 | 83% | 3 | 620 |
| HDTBD53 | 972757 | 56 | WUblastx. | (Q9BTV4) UNKNOWN (PROTEIN FOR MGC: 3222). | Q9BTV4 | 100% | 183 | 1382 |
| | | | 64 | | | | | |
| HDTBV77 | 785879 | 57 | WUblastx. | (Q9BT94) UNKNOWN (PROTEIN FOR MGC: 10848). | Q9BT94 | 99% | 65 | 2137 |
| | | | 64 | | | 69% | 2131 | 2169 |
| HDTDQ23 | 1306984 | 58 | WUblastx. | calcium-binding protein (clone pMP41) - mouse (fragment) | pir\|S04970\|S04970 | 100% | 1611 | 1709 |
| | | | 64 | | | | | |
| HDTDQ23 | 879009 | 226 | WUblastx. | calcium-binding protein (clone pMP41) - mouse (fragment) | pir\|S04970\|S04970 | 100% | 1623 | 1721 |
| | | | 64 | | | | | |
| HE2DE47 | 619852 | 59 | WUblastx. | (Q9NZN8) NOT2P (CCR4-NOT TRANSCRIPTION | Q9NZN8 | 96% | 808 | 2427 |
| | | | 64 | COMPLEX, SUBUNIT 2). | | | | |
| HE2NV57 | 740750 | 60 | WUblastx. | (Q9UGV6) BK445C9.3 (HIGH-MOBILITY GROUP | Q9UGV6 | 31% | 321 | 866 |
| | | | 64 | (NONHISTONE CHROMOSOMAL) PROT | | 66% | 71 | 106 |
| HE2PH36 | 570903 | 61 | WUblastx. | (AAH07609) Similar to hypothetical protein PRO1722. | AAH07609 | 56% | 1359 | 1285 |
| | | | 64 | | | 90% | 1524 | 1492 |
| | | | | | | 68% | 1484 | 1353 |
| HE8DS15 | 847060 | 62 | Wublastx. | (Q9WVT0) SEVEN TRANSMEMBRANE RECEPTOR. | Q9WVT0 | 80% | 1 | 270 |
| | | | 64 | | | 24% | 48 | 146 |
| | | | | | | 87% | 269 | 985 |
| HEOMQ63 | 603533 | 64 | WUblastx. | (Q9BQM3) DJ842G6.1.1 (NOVEL PROTEIN) | Q9BQM3 | 100% | 1036 | 1293 |
| | | | 64 | (FRAGMENT). | | 100% | 592 | 639 |
| | | | | | | 99% | 635 | 937 |
| HFABH95 | 566712 | 66 | WUblastx. | (Q9QZH5) PUTATIVE | Q9QZH5 | 88% | 5139 | 944 |
| | | | 64 | PHOSPHATE/PHOSPHOENOLPYRUVATE | | 65% | | 77 |
| | | | | TRANSLOCATOR. | | | | |
| HFAEF57 | 534142 | 67 | WUblastx. | (Q9HBN2) HYPOTHETICAL 15.8 KDA PROTEIN. | Q9HBN2 | 47% | 601 | 425 |
| | | | 64 | | | | | |
| HFCEB37 | 411345 | 68 | WUblastx. | (Q9NYC6) NEURONAL SPECIFIC TRANSCRIPTION | Q9NYC6 | 94% | 4 | 204 |
| | | | 64 | FACTOR DAT1. | | | | |
| HFGAD82 | 513669 | 70 | WUblastx. | membrane glycoprotein M6 - mouse | pir\|I78556\|I78556 | 92% | 249 | 410 |
| | | | 64 | | | | | |
| HFIUR10 | 532060 | 71 | WUblastx. | (AAK55521) PRO0764. | AAK55521 | 47% | 369 | 307 |
| | | | 64 | | | 75% | 497 | 411 |
| HFTBM50 | 545012 | 72 | WUblastx. | (Q9H8P0) CDNA FLJ13352 FIS, CLONE | Q9H8P0 | 100% | 23 | 229 |
| | | | 64 | OVARC1002165, WEAKLY SIMILAR TO 3-O | | 91% | 198 | 524 |
| HFXJX44 | 701988 | 75 | WUblastx. | (Q9N083) UNNAMED PORTEIN PRODUCT. | Q9N083 | 57% | 1378 | 1082 |
| | | | 64 | | | | | |
| HFXKT05 | 658690 | 76 | WUblastx. | (Q9H5H7) CDNA: FLJ23425 FIS, CLONE HEP22862. | Q9H5H7 | 81% | 5 | 1015 |
| | | | 64 | | | | | |
| HGBHI35 | 570262 | 77 | HMMER | PFAM: Enoyl-CoA hydratase/isomerase family | PF00378 | 184.6 | 213 | 722 |
| | | | 2.1.1 | | | | | |
| | | | WUblastx. | (Q9DBD3) 1300017C12RIK PROTEIN. | Q9DBD3 | 90% | 225 | 962 |
| | | | 64 | | | | | |
| HHGCM76 | 662329 | 81 | WUblastx. | (Q96FV2) Unknown (protein for IMAGE: 3945715) | Q96FV2 | 94% | 7 | 114 |
| | | | 64 | (Fragment). | | 98% | 378 | 536 |
| HHGCM76 | 383547 | 230 | WUblastx. | (Q96FV2) Unknown (protein for IMAGE: 3945715) | Q96FV2 | 94% | 7 | 114 |
| | | | 64 | (Fragment). | | 98% | 378 | 536 |
| HHPEN62 | 695134 | 82 | HMMER | PFAM: Peptidase family M20/M25/M40 | PF01546 | 148.9 | 510 | 1535 |
| | | | 2.1.1 | | | | | |
| | | | Wublastx. | (Q96KN2) Glutamate carboxypeptidase-like protein 2. | Q96KN2 | 99% | 183 | 1706 |
| | | | 64 | | | | | |
| HJABB94 | 456466 | 83 | WUblastx. | (Q9BWV3) PROTEIN KINASE NYD-SP15. | Q9BWV3 | 100% | 8 | 250 |
| | | | 64 | | | 38% | 1127 | 1192 |
| | | | | | | 94% | 1227 | 1523 |
| HJACG30 | 895505 | 84 | WUblastx. | (Q9UM21) UDP-GLCNAC: A-1,3-D-MANNOSIDE B-1,4- | Q9UM21 | 96% | 291 | 389 |
| | | | 64 | N-ACETYLGLUCOSAMINYLTRANS | | | | |
| HJBCY35 | 719729 | 85 | WUblastx. | hypothetical protein DKFZp586J0619.1 - human (fragment) | pir\|T08758\| | 100% | 1 | 1212 |
| | | | 64 | | T08758 | | | |
| HJPAD75 | 651337 | 86 | WUblastx. | (Q9H5F8) CDNA: FLJ23476 FIS, CLONE HSI14935. | Q9H5F8 | 98% | 8 | 232 |
| | | | 64 | | | | | |
| HKABZ65 | 862030 | 87 | WUblastx. | (Q96LB9) Peptidoglycan recognition protein-I-alpha | Q96LB9 | 90% | 77 | 802 |
| | | | 64 | precursor. | | 39% | 137 | 541 |
| HKABZ65 | 665424 | 233 | WUblastx. | (Q96LB9) Peptidoglycan recognition protein-I-alpha | Q96LB9 | 99% | 69 | 794 |
| | | | 64 | precursor. | | 45% | 129 | 533 |
| HKACB56 | 554616 | 88 | HMMER | PFAM: Kazal-type serine protease inhibitor domain | PF00050 | 76.3 | 114 | 266 |
| | | | 2.1.1 | | | | | |
| | | | WUblastx. | (P01001) ACROSIN INHIBITORS IIA AND IIB | IAC2_BOVIN | 82% | 96 | 266 |
| | | | 64 | (BUSI-II). | | | | |
| HKACD58 | 552465 | 234 | WUblastx. | (Q96BH2) Hypothetical 34.4 kDa protein. | Q96BH2 | 86% | 795 | 1208 |
| | | | 64 | | | 87% | 122 | 724 |
| HKAEV06 | 638238 | 235 | WUblastx. | (Q9NVA4) CDNA FLJ10846 FIS, CLONE | Q9NVA4 | 96% | 367 | 459 |
| | | | 64 | NT2RP4001373. | | 100% | 197 | 367 |
| | | | | | | 96% | 480 | 1541 |
| HKAFT66 | 946512 | 91 | WUblastx. | (Q9CPS2) 4933428I03RIK PROTEIN. | Q9CPS2 | 72% | 29 | 61 |
| | | | 64 | | | 62% | 82 | 231 |
| | | | | | | 84% | 274 | 828 |
| HKAFT66 | 889258 | 236 | blastx | (AF022985) No definition line found [Caenorhabditis | gb\|AAB69975.1\| | 21% | 292 | 543 |
| | | | | elegans] | | 25% | 562 | 702 |
| | | | | | | 29% | 691 | 801 |
| HKAFT66 | 904790 | 237 | blastx.2 | (AJ271091) B-ind1 protein [Homo sapiens] | emb\|CAB69070.1\| | 34% | 12 | 296 |
| | | | | | | 45% | 298 | 516 |
| HKB1E57 | 876571 | 92 | HMMER | PFAM: Uncharacterized protein family UPF0004 | PF00919 | 320.5 | 178 | 843 |
| | | | 2.1.1 | | | | | |
| | | | WUblastx. | (Q9BWZ5) DJ1187J4.4 (CGI-05 PROTEIN (LOC51654) | Q9BWZ5 | 99% | 1 | 879 |
| | | | 64 | SIMILAR TO RAT CDK5 AC | | | | |
| HKB1E57 | 654871 | 238 | WUblastx. | (Q9BVG6) SIMILAR TO CGI-05 PROTEIN. | Q9BVG6 | 90% | 78 | 167 |
| | | | 64 | | | | | |
| HKFBC53 | 701893 | 239 | WUblastx. | hypothetical protein F16H11.1 - Caenorhabditis elegans | pir\|T16084\| | 45% | 132 | 305 |
| | | | 64 | | T16084 | 59% | 11 | 106 |
| | | | | | | 50% | 82 | 129 |
| | | | | | | 37% | 566 | 673 |
| | | | | | | 37% | 293 | 1366 |
| HKFBC53 | 513190 | 240 | WUblastx. | hypothetical protein F16H11.1 - Caenorhabditis elegans | pir\|T16084\| | 35% | 135 | 902 |
| | | | 64 | | T16084 | | | |
| HKFBC53 | 383426 | 241 | WUblastx. | hypothetical protein F16H11.1 - Caenorhabditis elegans | pir\|T16084\| | 38% | 704 | 949 |
| | | | 64 | | T16084 | 32% | 135 | 713 |
| HKGDL36 | 877489 | 94 | WUblastx. | (Q9UHG2) PROSAAS PRECURSOR (GRANIN-LIKE | Q9UHG2 | 100% | 563 | 793 |
| | | | 64 | NEUROENDOCRINE PEPTIDE PRECUR | | 63% | 53 | 409 |
| HKGDL36 | 704088 | 242 | WUblastx. | (Q9UHG2) PROSAAS PRECURSOR (GRANIN-LIKE | Q9UHG2 | 82% | 99 | 830 |
| | | | 64 | NEUROENDOCRINE PEPTIDE PRECUR | | 49% | 55 | 555 |
| HKISB57 | 625956 | 95 | WUblastx. | (AAL36150) Smoothelin-B3. | AAL36150 | 28% | 262 | 582 |
| | | | 64 | | | 100% | 201 | 1013 |
| | | | | | | 98% | 1107 | 1256 |
| | | | | | | 27% | 271 | 480 |
| | | | | | | 26% | 532 | 966 |
| | | | | | | 44% | 954 | 1052 |
| HKMLM11 | 514788 | 96 | WUblastx. | (Q9P059) HSPC323 (FRAGMENT). | Q9P059 | 71% | 332 | 562 |
| | | | 64 | | | 85% | 148 | 462 |
| HKMMW74 | 581399 | 97 | WUblastx. | (AAG23169) HC6. | AAG23169 | 73% | 1784 | 1662 |
| | | | 64 | | | | | |
| HLDQR62 | 753742 | 99 | WUblastx. | (Q9NQW2) PROGRESSIVE ANKYLOSIS-LIKE | Q9NQW2 | 100% | 41 | 382 |
| | | | 64 | PROTEIN. | | 99% | 376 | 1002 |
| HLDQU79 | 740755 | 100 | WUblastx. | (O75477) KE04P. | 075477 | 100% | 105 | 1142 |
| | | | 64 | | | | | |
| HLICQ90 | 791828 | 103 | WUblastx. | (Q96N65) CDNA FLJ31349 fis, clone MESAN2000092, | Q96N65 | 95% | 571 | 636 |
| | | | 64 | moderately similar to | | 93% | 59 | 616 |
| HLTHR66 | 699812 | 104 | HMMER | PFAM: PAP2 superfamily | PF01569 | 22.3 | 35 | 151 |
| | | | 2.1.1 | | | | | |
| | | | WUblastx. | (Q9D4F2) 4932443D16RIK PROTEIN. | Q9D4F2 | 93% | 2 | 229 |
| | | | 64 | | | | | |
| HLTIP94 | 1087335 | 105 | WUblastx. | (Q96DH6) Hypothetical 35.2 kDa protein. | Q96DH6 | 80% | 579 | 740 |
| | | | 64 | | | | | |
| HLTIP94 | 1047690 | 244 | HMMER | PFAM: RNA recognition motif. (a.k.a. RRM, RBD, or | PF00076 | 143.1 | 40 | −172 |
| | | | 2.1.1 | RNP domain) | | | | |
| HLWAA17 | 629552 | 106 | WUblastx. | (Q9NY26) IRTI PROTEIN (SIMILAR TO ZINC/IRON | Q9NY26 | 99% | 85 | 960 |
| | | | 64 | REGULATED TRANSPORTER-LIK | | | | |
| HMADK33 | 561941 | 108 | WUblastx. | hypothetical protein DKFZp761P2414.1 - human | pir\|T47139\| | 100% | 152 | 175 |
| | | | 64 | | T47139 | 87% | 394 | 417 |
| | | | | | | 96% | 237 | 395 |
| HMAMI15 | 1352406 | 109 | blastx.14 | (Q96QY4) BA134O15.1 (similar to citrate lyase) | Q96QY4 | 99% | 85 | 1023 |
| | | | | (Fragment). | | | | |
| HMAMI15 | 1049263 | 245 | WUblastx. | (Q96QY4) BA134O15.1 (similar to citrate lyase) | Q96QY4 | 79% | 372 | 920 |
| | | | 64 | (Fragment). | | 100% | 84 | 440 |
| HMCFY13 | 635301 | 110 | WUblastx. | (AAL32175) Chromosome 17 open reading frame 26. | AAL32175 | 95% | 36 | 737 |
| | | | 64 | | | | | |
| HMEED18 | 560775 | 112 | WUblastx. | (Q9H651) CDNA: FLJ22604 FIS, CLONE HSI04630 | Q9H651 | 93% | 34 | 696 |
| | | | 64 | (BBP-LIKE PROTEIN 2). | | | | |
| HMSDL37 | 973996 | 115 | WUblastx. | (Q9H743) CDNA: FLJ121394 FIS, CLONE COL03536. | Q9H743 | 66% | 1189 | 1497 |
| | | | 64 | | | | | |
| HMSFI26 | 560229 | 116 | WUblastx. | (Q14713) POT. ORF V. | Q14713 | 57% | 1075 | 1019 |
| | | | 64 | | | 39% | 1041 | 805 |
| HMVBS81 | 639203 | 117 | WUblastx. | (O95070) 54TMP. | O95070 | 100% | 10 | 450 |
| | | | 64 | | | | | |
| HMWFT65 | 562063 | 119 | WUblastx. | (Q96AZ2) Similar to hypothetical protein FLJ21463. | Q96AZ2 | 67% | 1342 | 1205 |
| | | | 64 | | | | | |
| HNFFC43 | 753337 | 121 | WUblastx. | (Q96BY8) Hypothetical 55.2 kDa protein. | Q96BY8 | 97% | 319 | 453 |
| | | | 64 | | | 66% | 428 | 769 |
| | | | | | | 87% | 651 | 839 |
| | | | | | | 99% | 903 | 1517 |
| HNFIY77 | 634551 | 122 | WUblastx. | (AAL47020) KCCR13L. | AAL47020 | 96% | 866 | 1030 |
| | | | 64 | | | 99% | 105 | 866 |
| HNFJF07 | 577013 | 123 | WUblastx. | (AAL55831) Hypothetical 14.1 kDa protein. | AAL55831 | 65% | 585 | 457 |
| | | | 64 | | | | | |
| HNGIJ31 | 519120 | 125 | WUblastx. | (Q9N083) UNNAMED PORTEIN PRODUCT. | Q9N083 | 73% | 566 | 610 |
| | | | 64 | | | 54% | 615 | 725 |
| | | | | | | 66% | 454 | 561 |
| HNGJE50 | 561568 | 126 | WUblastx. | (Q9HBS7) HYPOTHETICAL 14.2 KDA PROTEIN. | Q9HBS7 | 64% | 1028 | 945 |
| | | | 64 | | | 62% | 919 | 734 |
| HNHEU93 | 634851 | 129 | WUblastx. | (Q9H387) PRO2550. | Q9H387 | 67% | 741 | 418 |
| | | | 64 | | | | | |
| HNHFM14 | 664507 | 130 | WUblastx. | (Q9N8S9) POSSIBLE (HHV-6) U1102, VARIANT A | Q9N8S9 | 74% | 6 | 122 |
| | | | 64 | DNA, COMPLETE VIRION GENOM | | 45% | 17 | 223 |
| | | | | | | 63% | 11 | 124 |
| | | | | | | 79% | 9 | 110 |
| | | | | | | 76% | 9 | 122 |
| HNHNB29 | 895462 | 131 | WUblastx. | (Q9P195) PRO1722. | Q9P195 | 79% | 1543 | 1674 |
| | | | 64 | | | 75% | 1398 | 1553 |
| HNHOD46 | 843488 | 132 | WUblastx. | (O60448) NEURONAL THREAD PROTEIN AD7C-NTP. | O60448 | 76% | 334 | 552 |
| | | | 64 | | | 56% | 646 | 921 |
| | | | | | | 56% | 645 | 713 |
| | | | | | | 52% | 844 | 894 |
| | | | | | | 73% | 331 | 498 |
| | | | | | | 59% | 353 | 625 |
| | | | | | | 50% | 828 | 917 |
| | | | | | | 70% | 721 | 792 |
| | | | | | | 48% | 781 | 915 |
| | | | | | | 50% | 558 | 791 |
| | | | | | | 35% | 401 | 595 |
| | | | | | | 31% | 283 | 552 |
| | | | | | | 50% | 379 | 462 |
| | | | | | | 61% | 486 | 839 |
| HNTBI26 | 1310821 | 133 | WUblastx. | (Q96F65) Similar to RIKEN cDNA 0610031J06 gene | Q96F65 | 92% | 145 | 987 |
| | | | 64 | (Fragment). | | 60% | 7 | 150 |
| HNTBI26 | 796807 | 251 | WUblastx. | (Q96F65) Similar to RIKEN cDNA 0610031J06 gene | Q96F65 | 94% | 516 | 992 |
| | | | 64 | (Fragment). | | 97% | 149 | 544 |
| | | | | | | 29% | 1096 | 1206 |
| | | | | | | 95% | 11 | 154 |
| HNTBL27 | 545534 | 134 | WUblastx. | (Q96AA3) Putative endoplasmic reticulum multispan | Q96AA3 | 98% | 243 | 500 |
| | | | 64 | transmembrane prote | | 33% | 13 | 168 |
| | | | | | | 40% | 646 | 711 |
| | | | | | | 96% | 13 | 261 |
| HNTCE26 | 1160395 | 135 | HMMER | PFAM: 7 transmembrane receptor (rhodopsin family) | PF00001 | 137.5 | 282 | 1037 |
| | | | 2.1.1 | | | | | |
| | | | WUblastx. | (Q9H1Y3) DJ317G22.2 (ENCEPHALOPSIN) | Q9H1Y3 | 100% | 111 | 1316 |
| | | | 64 | (PANOPSIN). | | | | |
| HNTCE26 | 853373 | 253 | HMMER | PFAM: 7 transmembrane receptor (rhodopsin family) | PF00001 | 23.2 | 63 | 218 |
| | | | 2.1.1 | | | | | |
| | | | WUblastx. | (Q9H1Y3) DJ317G22.2 (ENCEPHALOPSIN) | Q9H1Y3 | 95% | 370 | 495 |
| | | | 64 | (PANOPSIN). | | 100% | 12 | 377 |
| HODDN92 | 422913 | 138 | WUblastx. | (Q9H1S5) BA110H4.2 (SIMILAR TO MEMBRANE | Q9H1S5 | 100% | 1119 | 1021 |
| | | | 64 | PROTEIN). | | | | |
| HOFMQ33 | 1184465 | 139 | WUblastx. | (O15232) MATRILIN-3 PRECURSOR. | MTN3_HUMAN | 85% | 205 | 1500 |
| | | | 64 | | | | | |
| HOFMQ33 | 919896 | 255 | HMMER | PFAM: von Willebrand factor type A domain | PF00092 | 189.8 | 288 | 815 |
| | | | 2.1.1 | | | | | |
| | | | WUblastx. | (O15232) MATRILIN-3 PRECURSOR. | MTN3_HUMAN | 85% | 204 | 1499 |
| | | | 64 | | | | | |
| HOFMQ33 | 906694 | 256 | HMMER | PFAM: von Willebrand factor type A domain | PF00092 | 162.2 | 318 | 737 |
| | | | 2.1.1 | | | | | |
| HOFOC73 | 931871 | 140 | HMMER | PFAM: Papain family cysteine protease | PF00112 | 22.3 | 192 | 311 |
| | | | 2.1.1 | | | | | |
| | | | WUblastx. | (BAB22302) Adult male kidney cDNA, RIKEN full-lengt | BAB22302 | 71% | 72 | 341 |
| | | | 64 | | | 87% | 316 | 918 |
| HOQBJ82 | 858338 | 262 | WUblastx. | (CAC37795) H-1(3)mbt-like protein. | CAC37795 | 66% | 436 | 585 |
| | | | 64 | | | 57% | 41 | 496 |
| HOQBJ82 | 857453 | 263 | HMMER | PFAM: SET domain | PF00856 | 211.5 | 100 | 489 |
| | | | 2.1.1 | | | | | |
| HOSDJ25 | 854234 | 143 | WUblastx. | (Q9D8Y9) 1810018L05RIK PROTEIN. | Q9D8Y9 | 85% | 468 | 593 |
| | | | 64 | | | 86% | 143 | 544 |
| HPEAD79 | 520202 | 144 | WUblastx. | (Q96NR6) CDNA FLJ30278 fis, clone BRACE2002755. | Q96NR6 | 48% | 498 | 806 |
| | | | 64 | | | | | |
| HPIBO15 | 1310868 | 145 | WUblastx. | (Q9CQS3) 1110018M03RIK PROTEIN. | Q9CQS3 | 93% | 128 | 757 |
| | | | 64 | | | | | |
| HPIBO15 | 590741 | 265 | WUblastx. | (Q9CQS3) 1110018M03RIK PROTEIN. | Q9CQS3 | 88% | 127 | 402 |
| | | | 64 | | | 95% | 507 | 722 |
| | | | | | | 97% | 401 | 508 |
| HPJBI33 | 685699 | 146 | WUblastx. | (O60448) NEURONAL THREAD PROTEIN AD7C-NTP. | O60448 | 49% | 617 | 934 |
| | | | 64 | | | 33% | 633 | 890 |
| | | | | | | 51% | 24 | 122 |
| | | | | | | 35% | 570 | 872 |
| | | | | | | 33% | 1317 | 1415 |
| | | | | | | 51% | 155 | 256 |
| | | | | | | 59% | 154 | 234 |
| | | | | | | 52% | 137 | 256 |
| | | | | | | 34% | 41 | 256 |
| | | | | | | 50% | 3 | 146 |
| | | | | | | 47% | 886 | 942 |
| HPMDK28 | 846357 | 148 | WUblastx. | (Q9NP77) CDNA FLJ10947 FIS, CLONE | Q9NP77 | 100% | 163 | 666 |
| | | | 64 | PLACE1000066, WEAKLY SIMILAR TO SSU | | | | |
| HPMDK28 | 639118 | 269 | WUblastx. | (Q9NP77) CDNA FLJ10947 FIS, CLONE | Q9NP77 | 100% | 157 | 660 |
| | | | 64 | PLACE1000066, WEAKLY SIMILAR TO SSU | | | | |
| HPRAL78 | 844216 | 270 | WUblastx. | (AAH08720) Unknown (protein for MGC: 8447). | AAH08720 | 83% | 70 | 1017 |
| | | | 64 | | | 51% | 490 | 1068 |
| HPRAL78 | 484735 | 271 | WUblastx. | (Q91XD7) Unknown (protein for MGC: 18896). | Q91XD7 | 95% | 124 | 336 |
| | | | 64 | | | | | |
| HRABA80 | 882176 | 150 | WUblastx. | (Q9HA75) CDNA FLJ12122 FIS, CLONE | Q9HA75 | 63% | 221 | 310 |
| | | | 64 | MAMMA1000129. | | 68% | 325 | 459 |
| HRABA80 | 588460 | 272 | WUblastx. | (Q9HA75) CDNA FLJ12122 FIS, CLONE | Q9HA75 | 63% | 633 | 665 |
| | | | 64 | MAMMA1000129. | | 48% | 130 | 357 |
| | | | | | | 92% | 233 | 493 |
| HRACD15 | 871221 | 151 | WUblastx. | (AAH08084) Hypothetical 50.4 kDa protein. | AAH08084 | 98% | 1452 | 253 |
| | | | 64 | | | | | |
| HRACJ35 | 877666 | 152 | WUblastx. | (Q9Y5X6) BLOOD PLASMA GLUTAMATE | Q9Y5X6 | 65% | 1519 | 1755 |
| | | | 64 | CARBOXYPEPTIDASE PRECURSOR (EC 3.4.17 | | 99% | 132 | 1472 |
| HRACJ35 | 730504 | 274 | WUblastx. | (Q9Y5X6) BLOOD PLASMA GLUTAMATE | Q9Y5X6 | 98% | 1435 | 1722 |
| | | | 64 | CARBOXYPEPTIDASE PRECURSOR (EC 3.4.17 | | 99% | 99 | 1439 |
| HRACJ35 | 470546 | 275 | blastx.2 | AMINOPEPTIDASE. | sp\|Q9Y646\| | 100% | 1 | 519 |
| | | | | | Q9Y646 | 96% | 507 | 785 |
| HRGBL78 | 910133 | 153 | HMMER | PFAM: Immunoglobulin domain | PF00047 | 32 | 582 | 755 |
| | | | 2.1.1 | | | | | |
| | | | WUblastx. | (AAL58111) FREB. | AAL58111 | 87% | 9 | 1085 |
| | | | 64 | | | | | |
| HROAJ39 | 1181699 | 154 | WUblastx. | (Q96ES0) Unknown (protein for MGC: 16944). | Q96ES0 | 92% | 7 | 1146 |
| | | | 64 | | | | | |
| HROBD68 | 827306 | 155 | WUblastx. | (Q9H728) CDNA: FLJ21463 FIS, CLONE COL04765. | Q9H728 | 66% | 418 | 576 |
| | | | 64 | | | 78% | 581 | 748 |
| HSAWD74 | 460527 | 156 | WUblastx. | (Q9NX85) CDNA FLJ20378 FIS, CLONE KAIA0536. | Q9NX85 | 67% | 967 | 674 |
| | | | 64 | | | | | |
| HSDEK49 | 625998 | 282 | HMMER | PFAM: Immunoglobulin domain | PF00047 | 18.7 | 225 | 470 |
| | | | 2.1.1 | | | | | |
| | | | WUblastx. | (Q9Y279) Z39IG PROTEIN PRECURSOR. | Q9Y279 | 88% | 444 | 1040 |
| | | | 64 | | | 99% | 126 | 542 |
| HSDFJ26 | 834619 | 158 | WUblastx. | (Q9BYJ0) KSP37. | Q9BYJ0 | 99% | 99 | 767 |
| | | | 64 | | | | | |
| HSDFJ26 | 836071 | 283 | blastx.2 | (AB021123) Ksp37 [Homo sapiens] | dbj\|BAB39770.1\| | 83% | 238 | 768 |
| | | | | | | 77% | 99 | 281 |
| HSDSE75 | 545057 | 160 | WUblastx. | (O60245) PCDH7 (BH-PCDH)A. | O60245 | 100% | 10 | 702 |
| | | | 64 | | | | | |
| HSIDJ81 | 589447 | 161 | WUblastx. | (Q9H728) CDNA: FLJ21463 FIS, CLONE COL04765. | Q9H728 | 74% | 1289 | 996 |
| | | | 64 | | | | | |
| HSKDA27 | 1074734 | 285 | WUblastx. | (Q9CRM1) 2610001E17RIK PROTEIN (FRAGMENT). | Q9CRM1 | 70% | 793 | 1701 |
| | | | 64 | | | 60% | 1686 | 1784 |
| | | | | | | 23% | 1604 | 1741 |
| HSKDA27 | 872570 | 286 | blastx.2 | (AK020169) putative [Mus musculus] | dbj\|BAB32018.1\| | 47% | 666 | 1562 |
| HSKGN81 | 676075 | 163 | WUblastx. | (Q9CZY7) 2610307O08RIK PROTEIN. | Q9CZY7 | 68% | 146 | 1126 |
| | | | 64 | | | | | |
| HSNAD72 | 467397 | 164 | WUblastx. | (Q9P195) PRO1722. | Q9P195 | 62% | 825 | 730 |
| | | | 64 | | | 53% | 623 | 579 |
| | | | | | | 59% | 730 | 536 |
| HSUBW09 | 413246 | 168 | WUblastx. | (Q95LL0) Hypothetical 11.3 kDa protein. | Q95LL0 | 73% | 589 | 633 |
| | | | 64 | | | 77% | 327 | 611 |
| HSVBU91 | 596868 | 169 | WUblastx. | cytoplasmic linker protein CLIP-115-rat | pir\|T42734\| | 85% | 356 | 171 |
| | | | 64 | | T42734 | | | |
| HTAEE28 | 1018291 | 170 | WUblastx. | (Q9D4I2) 4932408F18RIK PROTEIN. | Q9D4I2 | 72% | 319 | 1161 |
| | | | 64 | | | | | |
| HTEEB42 | 206980 | 172 | HMMER | PFAM: Immunoglobulin domain | PF00047 | 48.5 | 500 | 706 |
| | | | 2.1.1 | | | | | |
| | | | WUblastx. | (AAG49022) Junctional adhesion molecule 2. | AAG49022 | 94% | 110 | 952 |
| | | | 64 | | | | | |
| HTELP17 | 836072 | 174 | WUblastx. | (AAH20029) Hypothetical 39.4 kDa protein. | AAH20029 | 81% | 22 | 528 |
| | | | 64 | | | | | |
| HTELS08 | 847090 | 175 | WUblastx. | (Q9JI83) EPCS26 (PLAC1) (PLACENTAL SPECIFIC | Q9JI83 | 34% | 33 | 395 |
| | | | 64 | PROTEIN 1). | | | | |
| HTLEP53 | 634852 | 176 | WUblastx. | (Q9H728) CDNA: FLJ21463 FIS, CLONE COL04765. | Q9H728 | 69% | 806 | 501 |
| | | | 64 | | | | | |
| HTPCS72 | 854941 | 177 | WUblastx. | (O95880) UNKNOWN. | O95880 | 100% | 2191 | 2577 |
| | | | 64 | | | | | |
| HTPCS72 | 566683 | 293 | WUblastx. | (O95880) UNKNOWN. | O95880 | 100% | 356 | 742 |
| | | | 64 | | | | | |
| HTPIH83 | 919916 | 178 | HMMER | PFAM: PMP-22/EMP/MP20/Claudin family | PF00822 | 81.5 | 127 | 660 |
| | | | 2.1.1 | | | | | |
| | | | WUblastx. | (P57739) CLAUDIN-2. | CLD2_HUMAN | 85% | 199 | 807 |
| | | | 64 | | | | | |
| HTPIH83 | 895024 | 294 | HMMER | PFAM: PMP-22/EMP/MP20/Claudin family | PF00822 | 55.9 | 120 | 500 |
| | | | 2.1.1 | | | | | |
| | | | WUblastx. | (P57739) CLAUDIN-2. | CLD2_HUMAN | 87% | 192 | 530 |
| | | | 64 | | | | | |
| HTTBS64 | 1008159 | 181 | WUblastx. | reverse transcriptase-related protein - rabbit (fragment) | pir\|S22049\|S22049 | 70% | 996 | 895 |
| | | | 64 | | | 52% | 896 | 714 |
| HTXJM03 | 603918 | 182 | WUblastx. | (Q9BRH0) SIMILAR TO DKFZP727C091 PROTEIN. | Q9BRH0 | 100% | 470 | 565 |
| | | | 64 | | | 99% | 564 | 1760 |
| HTXON32 | 838288 | 183 | WUblastx. | (Q96NR6) CDNA FLJ30278 fis, clone BRACE2002755. | Q96NR6 | 58% | 1397 | 1498 |
| | | | 64 | | | 64% | 1194 | 1397 |
| HWAAD63 | 838626 | 186 | HMMER | PFAM: Sodium/calcium exchanger protein | PF01699 | 62.8 | 346 | 453 |
| | | | 2.1.1 | | | | | |
| | | | WUblastx. | (Q9HC58) SODIUM/CALCIUM EXCHANGER NCKX3. | Q9HC58 | 65% | 229 | 813 |
| | | | 64 | | | | | |
| HWAAD63 | 833089 | 298 | HMMER | PFAM: Sodium/calcium exchanger protein | PF01699 | 37.8 | 346 | 453 |
| | | | 2.1.1 | | | | | |
| | | | blastx.2 | (AF177984) potassium-dependent sodium-calcium | gb\|AAF25808.1\| | 45% | 217 | 453 |
| | | | | exchanger NCKX1 [Gallus gallus] | AF177984_1 | 41% | 533 | 793 |
| | | | | | | 45% | 453 | 596 |
| | | | | | | 31% | 319 | 453 |
| HWAAD63 | 793875 | 299 | HMMER | PFAM: Sodium/calcium exchanger protein | PF01699 | 113.7 | 336 | 773 |
| | | | 2.1.1 | | | | | |
| | | | blastx.2 | (AF025664) Na-Ca+K exchanger [Bos taurus] | gb\|AAB88884.1\| | 43% | 207 | 785 |
| HWBFX31 | 799427 | 188 | WUblastx. | (Q9N083) UNNAMED PORTEIN PRODUCT. | Q9N083 | 56% | 1663 | 1517 |
| | | | 64 | | | | | |

[0139] RACE Protocol For Recovery of Full-Length Genes

[0140] Partial cDNA clones can be made full-length by utilizing the rapid amplification of cDNA ends (RACE) procedure described in Frohman, M. A., et al., Proc. Nat'l. Acad. Sci. USA, 85:8998-9002 (1988). A cDNA clone missing either the 5′ or 3′ end can be reconstructed to include the absent base pairs extending to the translational start or stop codon, respectively. In some cases, cDNAs are missing the start codon of translation, therefor. The following briefly describes a modification of this original 5′ RACE procedure. Poly A+ or total RNA is reverse transcribed with Superscript II (Gibco/BRL) and an antisense or complementary primer specific to the cDNA sequence. The primer is removed from the reaction with a Microcon Concentrator (Amicon). The first-strand cDNA is then tailed with DATP and terminal deoxynucleotide transferase (Gibco/BRL). Thus, an anchor sequence is produced which is needed for PCR amplification. The second strand is synthesized from the dA-tail in PCR buffer, Taq DNA polymerase (Perkin-Elmer Cetus), an oligo-dT primer containing three adjacent restriction sites (XhoL SalI and ClaI) at the 5′ end and a primer containing just these restriction sites. This double-stranded cDNA is PCR amplified for 40 cycles with the same primers as well as a nested cDNA-specific antisense primer. The PCR products are size-separated on an ethidium bromide-agarose gel and the region of gel containing cDNA products the predicted size of missing protein-coding DNA is removed. cDNA is purified from the agarose with the Magic PCR Prep kit (Promega), restriction digested with XhoI or SalI, and ligated to a plasmid such as pBluescript SKII (Stratagene) at XhoI and EcoRV sites. This DNA is transformed into bacteria and the plasmid clones sequenced to identify the correct protein-coding inserts. Correct 5′ ends are confirmed by comparing this sequence with the putatively identified homologue and overlap with the partial cDNA clone. Similar methods known in the art and/or commercial kits are used to amplify and recover 3′ ends.

[0141] Several quality-controlled kits are commercially available for purchase. Similar reagents and methods to those above are supplied in kit form from Gibco/BRL for both 5′ and 3′ RACE for recovery of fall length genes. A second kit is available from Clontech which is a modification of a related technique, SLIC (single-stranded ligation to single-stranded cDNA), developed by Dumas et al., Nucleic Acids Res., 19:5227-32 (1991). The major differences in procedure are that the RNA is alkaline hydrolyzed after reverse transcription and RNA ligase is used to join a restriction site-containing anchor primer to the first-strand cDNA. This obviates the necessity for the dA-tailing reaction which results in a polyT stretch that is difficult to sequence past.

[0142] An alternative to generating 5′ or 3′ cDNA from RNA is to use cDNA library double-stranded DNA. An asymmetric PCR-amplified antisense cDNA strand is synthesized with an antisense cDNA-specific primer and a plasmid-anchored primer. These primers are removed and a symmetric PCR reaction is performed with a nested cDNA-specific antisense primer and the plasmid-anchored primer.

[0143] RNA Ligase Protocol For Generating The 5′ or 3′ End Sequences To Obtain Full Length Genes

[0144] Once a gene of interest is identified, several methods are available for the identification of the 5′ or 3′ portions of the gene which may not be present in the original cDNA plasmid. These methods include, but are not limited to, filter probing, clone enrichment using specific probes and protocols similar and identical to 5′ and 3′ RACE. While the full length gene may be present in the library and can be identified by probing, a useful method for generating the 5′ or 3′ end is to use the existing sequence information from the original cDNA to generate the missing information. A method similar to 5′ RACE is available for generating the missing 5′ end of a desired full-length gene. (This method was published by Fromont-Racine et al., Nucleic Acids Res., 21(7):1683-1684 (1993)). Briefly, a specific RNA oligonucleotide is ligated to the 5′ ends of a population of RNA presumably containing full-length gene RNA transcript and a primer set containing a primer specific to the ligated RNA oligonucleotide and a primer specific to a known sequence of the gene of interest, is used to PCR amplify the 5′ portion of the desired full length gene which may then be sequenced and used to generate the full length gene. This method starts with total RNA isolated from the desired source, poly A RNA may be used but is not a prerequisite for this procedure. The RNA preparation may then be treated with phosphatase if necessary to eliminate 5′ phosphate groups on degraded or damaged RNA which may interfere with the later RNA ligase step. The phosphatase if used is then inactivated and the RNA is treated with tobacco acid pyrophosphatase in order to remove the cap structure present at the 5′ ends of messenger RNAs. This reaction leaves a 5′ phosphate group at the 5′ end of the cap cleaved RNA which can then be ligated to an RNA oligonucleotide using T4 RNA ligase. This modified RNA preparation can then be used as a template for first strand cDNA synthesis using a gene specific oligonucleotide. The first strand synthesis reaction can then be used as a template for PCR amplification of the desired 5′ end using a primer specific to the ligated RNA oligonucleotide and a primer specific to the known sequence of the gene of interest. The resultant product is then sequenced and analyzed to confirm that the 5′ end sequence belongs to the relevant gene.

[0145] The present invention also relates to vectors or plasmids which include such DNA sequences, as well as the use of the DNA sequences. The material deposited with the ATCC (e.g., as described in columns 2 and 3 of Table 1A, and/or as set forth in Table 1B, Table 6, or Table 7) is a mixture of cDNA clones derived from a variety of human tissue and cloned in either a plasmid vector or a phage vector, as described, for example, in Table 1A and Table 7. These deposits are referred to as “the deposits” herein. The tissues from which some of the clones were derived are listed in Table 7, and the vector in which the corresponding cDNA is contained is also indicated in Table 7. The deposited material includes cDNA clones corresponding to SEQ ID NO:X described, for example, in Table 1A and/or Table 1B (ATCC Deposit No:Z). A clone which is isolatable from the ATCC Deposits by use of a sequence listed as SEQ ID NO:X, may include the entire coding region of a human gene or in other cases such clone may include a substantial portion of the coding region of a human gene. Furthermore, although the sequence listing may in some instances list only a portion of the DNA sequence in a clone included in the ATCC Deposits, it is well within the ability of one skilled in the art to sequence the DNA included in a clone contained in the ATCC Deposits by use of a sequence (or portion thereof) described in, for example Tables 1A and/or Table 1B or Table 2, by procedures hereinafter further described, and others apparent to those skilled in the art.

[0146] Also provided in Table 1A and Table 7 is the name of the vector which contains the cDNA clone. Each vector is routinely used in the art. The following additional information is provided for convenience.

[0147] Vectors Lambda Zap (U.S. Pat. Nos. 5,128,256 and 5,286,636), Uni-Zap XR (U.S. Pat. Nos. 5,128, 256 and 5,286,636), Zap Express (U.S. Pat. Nos. 5,128,256 and 5,286,636), pBluescript (pBS) (Short, J. M. et al., Nucleic Acids Res. 16:7583-7600 (1988); Alting-Mees, M. A. and Short, J. M., Nucleic Acids Res. 17:9494 (1989)) and pBK (Alting-Mees, M. A. et al., Strategies 5:58-61 (1992)) are commercially available from Stratagene Cloning Systems, Inc., 11011 N. Torrey Pines Road, La Jolla, Calif., 92037. pBS contains an ampicillin resistance gene and pBK contains a neomycin resistance gene. Phagemid pBS may be excised from the Lambda Zap and Uni-Zap XR vectors, and phagemid pBK may be excised from the Zap Express vector. Both phagemids may be transformed into E. coli strain XL-1 Blue, also available from Stratagene.

[0148] Vectors pSport1, pCMVSport 1.0, pCMVSport 2.0 and pCMVSport 3.0, were obtained from Life Technologies, Inc., P.O. Box 6009, Gaithersburg, Md. 20897. All Sport vectors contain an ampicillin resistance gene and may be transformed into E. coli strain DH10B, also available from Life Technologies. See, for instance, Gruber, C. E., et al., Focus 15:59-(1993). Vector lafinid BA (Bento Soares, Columbia University, New York, N.Y.) contains an ampicillin resistance gene and can be transformed into E. coli strain XL-1 Blue. Vector pCR®2.1, which is available from Invitrogen, 1600 Faraday Avenue, Carlsbad, Calif. 92008, contains an ampicillin resistance gene and may be transformed into E. coli strain DH10B, available from Life Technologies. See, for instance, Clark, J. M., Nuc. Acids Res. 16:9677-9686 (1988) and Mead, D. et al., Bio/Technology 9:(1991).

[0149] The present invention also relates to the genes corresponding to SEQ ID NO:X, SEQ ID NO:Y, and/or the deposited clone (ATCC Deposit No:Z). The corresponding gene can be isolated in accordance with known methods using the sequence information disclosed herein. Such methods include preparing probes or primers from the disclosed sequence and identifying or amplifying the corresponding gene from appropriate sources of genomic material.

[0150] Also provided in the present invention are allelic variants, orthologs, and/or species homologs. Procedures known in the art can be used to obtain full-length genes, allelic variants, splice variants, full-length coding portions, orthologs, and/or species homologs of genes corresponding to SEQ ID NO:X or the complement thereof, polypeptides encoded by genes corresponding to SEQ ID NO:X or the complement thereof, and/or the cDNA contained in ATCC Deposit No:Z, using information from the sequences disclosed herein or the clones deposited with the ATCC. For example, allelic variants and/or species homologs may be isolated and identified by making suitable probes or primers from the sequences provided herein and screening a suitable nucleic acid source for allelic variants and/or the desired homologue.

[0151] The polypeptides of the invention can be prepared in any suitable manner. Such polypeptides include isolated naturally occurring polypeptides, recombinantly produced polypeptides, synthetically produced polypeptides, or polypeptides produced by a combination of these methods. Means for preparing such polypeptides are well understood in the art.

[0152] The polypeptides may be in the form of the secreted protein, including the mature form, or may be a part of a larger protein, such as a fusion protein (see below). It is often advantageous to include an additional amino acid sequence which contains secretory or leader sequences, pro-sequences, sequences which aid in purification, such as multiple histidine residues, or an additional sequence for stability during recombinant production.

[0153] The polypeptides of the present invention are preferably provided in an isolated form, and preferably are substantially purified. A recombinantly produced version of a polypeptide, including the secreted polypeptide, can be substantially purified using techniques described herein or otherwise known in the art, such as, for example, by the one-step method described in Smith and Johnson, Gene 67:31-40 (1988). Polypeptides of the invention also can be purified from natural, synthetic or recombinant sources using techniques described herein or otherwise known in the art, such as, for example, antibodies of the invention raised against the polypeptides of the present invention in methods which are well known in the art.

[0154] The present invention provides a polynucleotide comprising, or alternatively consisting of, the nucleic acid sequence of SEQ ID NO:X, and/or the cDNA sequence contained in ATCC Deposit No:Z. The present invention also provides a polypeptide comprising, or alternatively, consisting of, the polypeptide sequence of SEQ ID NO:Y, a polypeptide encoded by SEQ ID NO:X or a complement thereof, a polypeptide encoded by the cDNA contained in ATCC Deposit No:Z, and/or the polypeptide sequence encoded by a nucleotide sequence in SEQ ID NO:B as defined in column 6 of Table 1C. Polynucleotides encoding a polypeptide comprising, or alternatively consisting of the polypeptide sequence of SEQ ID NO:Y, a polypeptide encoded by SEQ ID NO:X, a polypeptide encoded by the cDNA contained in ATCC Deposit No:Z, and/or a polypeptide sequence encoded by a nucleotide sequence in SEQ ID NO:B as defined in column 6 of Table 1C are also encompassed by the invention. The present invention further encompasses a polynucleotide comprising, or alternatively consisting of, the complement of the nucleic acid sequence of SEQ ID NO:X, a nucleic acid sequence encoding a polypeptide encoded by the complement of the nucleic acid sequence of SEQ ID NO:X, and/or the cDNA contained in ATCC Deposit No:Z.

[0155] Moreover, representative examples of polynucleotides of the invention comprise, or alternatively consist of, one, two, three, four, five, six, seven, eight, nine, ten, or more of the sequences delineated in Table 1C column 6, or any combination thereof. Additional, representative examples of polynucleotides of the invention comprise, or alternatively consist of, one, two, three, four, five, six, seven, eight, nine, ten, or more of the complementary strand(s) of the sequences delineated in Table 1C column 6, or any combination thereof. In further embodiments, the above-described polynucleotides of the invention comprise, or alternatively consist of, sequences delineated in Table 1C, column 6, and have a nucleic acid sequence which is different from that of the BAC fragment having the sequence disclosed in SEQ ID NO:B (see Table 1C, column 5). In additional embodiments, the above-described polynucleotides of the invention comprise, or alternatively consist of, sequences delineated in Table 1C, column 6, and have a nucleic acid sequence which is different from that published for the BAC clone identified as BAC ID NO:A (see Table 1C, column 4). In additional embodiments, the above-described polynucleotides of the invention comprise, or alternatively consist of, sequences delineated in Table 1C, column 6, and have a nucleic acid sequence which is different from that contained in the BAC clone identified as BAC ID NO:A (see Table 1C, column 4). Polypeptides encoded by these polynucleotides, other polynucleotides that encode these polypeptides, and antibodies that bind these polypeptides are also encompassed by the invention. Additionally, fragments and variants of the above-described polynucleotides and polypeptides are also encompassed by the invention.

[0156] Further, representative examples of polynucleotides of the invention comprise, or alternatively consist of, one, two, three, four, five, six, seven, eight, nine, ten, or more of the sequences delineated in column 6 of Table 1C which correspond to the same Clone ID (see Table 1C, column 1), or any combination thereof. Additional, representative examples of polynucleotides of the invention comprise, or alternatively consist of, one, two, three, four, five, six, seven, eight, nine, ten, or more of the complementary strand(s) of the sequences delineated in column 6 of Table 1C which correspond to the same Clone ID (see Table 1C, column 1), or any combination thereof. In further embodiments, the above-described polynucleotides of the invention comprise, or alternatively consist of, sequences delineated in column 6 of Table 1C which correspond to the same Clone ID (see Table 1C, column 1) and have a nucleic acid sequence which is different from that of the BAC fragment having the sequence disclosed in SEQ ID NO:B (see Table 1C, column 5). In additional embodiments, the above-described polynucleotides of the invention comprise, or alternatively consist of, sequences delineated in column 6 of Table 1C which correspond to the same Clone ID (see Table 1C, column 1) and have a nucleic acid sequence which is different from that published for the BAC clone identified as BAC ID NO:A (see Table 1C, column 4). In additional embodiments, the above-described polynucleotides of the invention comprise, or alternatively consist of, sequences delineated in column 6 of Table 1C which correspond to the same Clone ID (see Table 1C, column 1) and have a nucleic acid sequence which is different from that contained in the BAC clone identified as BAC ID NO:A (see Table 1C, column 4). Polypeptides encoded by these polynucleotides, other polynucleotides that encode these polypeptides, and antibodies that bind these polypeptides are also encompassed by the invention. Additionally, fragments and variants of the above-described polynucleotides and polypeptides are also encompassed by the invention.

[0157] Further, representative examples of polynucleotides of the invention comprise, or alternatively consist of, one, two, three, four, five, six, seven, eight, nine, ten, or more of the sequences delineated in column 6 of Table 1C which correspond to the same contig sequence identifier SEQ ID NO:X (see Table 1C, column 2), or any combination thereof. Additional, representative examples of polynucleotides of the invention comprise, or alternatively consist of, one, two, three, four, five, six, seven, eight, nine, ten, or more of the complementary strand(s) of the sequences delineated in column 6 of Table 1C which correspond to the same contig sequence identifier SEQ ID NO:X (see Table 1C, column 2), or any combination thereof. In further embodiments, the above-described polynucleotides of the invention comprise, or alternatively consist of, sequences delineated in column 6 of Table 1C which correspond to the same contig sequence identifier SEQ ID NO:X (see Table 1C, column 2) and have a nucleic acid sequence which is different from that of the BAC fragment having the sequence disclosed in SEQ ID NO:B (see Table 1C, column 5). In additional embodiments, the above-described polynucleotides of the invention comprise, or alternatively consist of, sequences delineated in column 6 of Table 1C which correspond to the same contig sequence identifier SEQ ID NO:X (see Table 1C, column 2) and have a nucleic acid sequence which is different from that published for the BAC clone identified as BAC ID NO:A (see Table 1C, column 4). In additional embodiments, the above-described polynucleotides of the invention comprise, or alternatively consist of, sequences delineated in column 6 of Table 1C which correspond to the same contig sequence identifier SEQ ID NO:X (see Table 1C, column 2) and have a nucleic acid sequence which is different from that contained in the BAC clone identified as BAC ID NO:A (See Table 1C, column 4). Polypeptides encoded by these polynucleotides, other polynucleotides that encode these polypeptides, and antibodies that bind these polypeptides are also encompassed by the invention. Additionally, fragments and variants of the above-described polynucleotides and polypeptides are also encompassed by the invention.

[0158] Moreover, representative examples of polynucleotides of the invention comprise, or alternatively consist of, one, two, three, four, five, six, seven, eight, nine, ten, or more of the sequences delineated in the same row of Table 1C column 6, or any combination thereof. Additional, representative examples of polynucleotides of the invention comprise, or alternatively consist of, one, two, three, four, five, six, seven, eight, nine, ten, or more of the complementary strand(s) of the sequences delineated in the same row of Table 1C column 6, or any combination thereof. In preferred embodiments, the polynucleotides of the invention comprise, or alternatively consist of, one, two, three, four, five, six, seven, eight, nine, ten, or more of the complementary strand(s) of the sequences delineated in the same row of Table 1C column 6, wherein sequentially delineated sequences in the table (i.e. corresponding to those exons located closest to each other) are directly contiguous in a 5′ to 3′ orientation. In further embodiments, above-described polynucleotides of the invention comprise, or alternatively consist of, sequences delineated in the same row of Table 1C, column 6, and have a nucleic acid sequence which is different from that of the BAC fragment having the sequence disclosed in SEQ ID NO:B (see Table 1C, column 5). In additional embodiments, the above-described polynucleotides of the invention comprise, or alternatively consist of, sequences delineated in the same row of Table 1C, column 6, and have a nucleic acid sequence which is different from that published for the BAC clone identified as BAC ID NO:A (see Table 1C, column 4). In additional embodiments, the above-described polynucleotides of the invention comprise, or alternatively consist of, sequences delineated in the same row of Table 1C, column 6, and have a nucleic acid sequence which is different from that contained in the BAC clone identified as BAC ID NO:A (see Table 1C, column 4). Polypeptides encoded by these polynucleotides, other polynucleotides that encode these polypeptides, and antibodies that bind these polypeptides are also encompassed by the invention.

[0159] In additional specific embodiments, polynucleotides of the invention comprise, or alternatively consist of, one, two, three, four, five, six, seven, eight, nine, ten, or more of the sequences delineated in column 6 of Table 1C, and the polynucleotide sequence of SEQ ID NO:X (e.g., as defined in Table 1C, column 2) or fragments or variants thereof. Polypeptides encoded by these polynucleotides, other polynucleotides that encode these polypeptides, and antibodies that bind these polypeptides are also encompassed by the invention.

[0160] In additional specific embodiments, polynucleotides of the invention comprise, or alternatively consist of, one, two, three, four, five, six, seven, eight, nine, ten, or more of the sequences delineated in column 6 of Table 1C which correspond to the same Clone ID (see Table 1C, column 1), and the polynucleotide sequence of SEQ ID NO:X (e.g., as defined in Table 1A, Table 1B, or Table 1C) or fragments or variants thereof. In preferred embodiments, the delineated sequence(s) and polynucleotide sequence of SEQ ID NO:X correspond to the same Clone ID. Polypeptides encoded by these polynucleotides, other polynucleotides that encode these polypeptides, and antibodies that bind these polypeptides are also encompassed by the invention.

[0161] In further specific embodiments, polynucleotides of the invention comprise, or alternatively consist of, one, two, three, four, five, six, seven, eight, nine, ten, or more of the sequences delineated in the same row of column 6 of Table 1C, and the polynucleotide sequence of SEQ ID NO:X (e.g., as defined in Table 1A, Table 1B, or Table 1C) or fragments or variants thereof. In preferred embodiments, the delineated sequence(s) and polynucleotide sequence of SEQ ID NO:X correspond to the same row of column 6 of Table 1C. Polypeptides encoded by these polynucleotides, other polynucleotides that encode these polypeptides, and antibodies that bind these polypeptides are also encompassed by the invention.

[0162] In additional specific embodiments, polynucleotides of the invention comprise, or alternatively consist of a polynucleotide sequence in which the 3′ 10 polynucleotides of one of the sequences delineated in column 6 of Table 1C and the 5′ 10 polynucleotides of the sequence of SEQ ID NO:X are directly contiguous. Nucleic acids which hybridize to the complement of these 20 contiguous polynucleotides under stringent hybridization conditions or alternatively, under lower stringency conditions, are also encompassed by the invention. Polypeptides encoded by these polynucleotides and/or nucleic acids, other polynucleotides and/or nucleic acids that encode these polypeptides, and antibodies that bind these polypeptides are also encompassed by the invention. Additionally, fragments and variants of the above-described polynucleotides, nucleic acids, and polypeptides are also encompassed by the invention.

[0163] In additional specific embodiments, polynucleotides of the invention comprise, or alternatively consist of, a polynucleotide sequence in which the 3′ 10 polynucleotides of one of the sequences delineated in column 6 of Table 1C and the 5′ 10 polynucleotides of a fragment or variant of the sequence of SEQ ID NO:X are directly contiguous Nucleic acids which hybridize to the complement of these 20 contiguous polynucleotides under stringent hybridization conditions or alternatively, under lower stringency conditions, are also encompassed by the invention. Polypeptides encoded by these polynucleotides and/or nucleic acids, other polynucleotides and/or nucleic acids encoding these polypeptides, and antibodies that bind these polypeptides are also encompassed by the invention. Additionally, fragments and variants of the above-described polynucleotides, nucleic acids, and polypeptides are also encompassed by the invention.

[0164] In specific embodiments, polynucleotides of the invention comprise, or alternatively consist of, a polynucleotide sequence in which the 3′ 10 polynucleotides of the sequence of SEQ ID NO:X and the 5′ 10 polynucleotides of the sequence of one of the sequences delineated in column 6 of Table 1C are directly contiguous. Nucleic acids which hybridize to the complement of these 20 contiguous polynucleotides under stringent hybridization conditions or alternatively, under lower stringency conditions, are also encompassed by the invention. Polypeptides encoded by these polynucleotides and/or nucleic acids, other polynucleotides and/or nucleic acids encoding these polypeptides, and antibodies that bind these polypeptides are also encompassed by the invention. Additionally, fragments and variants of the above-described polynucleotides, nucleic acids, and polypeptides are also encompassed by the invention.

[0165] In specific embodiments, polynucleotides of the invention comprise, or alternatively consist of, a polynucleotide sequence in which the 3′ 10 polynucleotides of a fragment or variant of the sequence of SEQ ID NO:X and the 5′ 10 polynucleotides of the sequence of one of the sequences delineated in column 6 of Table 1C are directly contiguous. Nucleic acids which hybridize to the complement of these 20 contiguous polynucleotides under stringent hybridization conditions or alternatively, under lower stringency conditions, are also encompassed by the invention. Polypeptides encoded by these polynucleotides and/or nucleic acids, other polynucleotides and/or nucleic acids encoding these polypeptides, and antibodies that bind these polypeptides are also encompassed by the invention. Additionally, fragments and variants of the above-described polynucleotides, nucleic acids, and polypeptides, are also encompassed by the invention.

[0166] In further specific embodiments, polynucleotides of the invention comprise, or alternatively consist of, a polynucleotide sequence in which the 3′ 10 polynucleotides of one of the sequences delineated in column 6 of Table 1C and the 5′ 10 polynucleotides of another sequence in column 6 are directly contiguous. Nucleic acids which hybridize to the complement of these 20 contiguous polynucleotides under stringent hybridization conditions or alternatively, under lower stringency conditions, are also encompassed by the invention. Polypeptides encoded by these polynucleotides and/or nucleic acids, other polynucleotides and/or nucleic acids encoding these polypeptides, and antibodies that bind these polypeptides are also encompassed by the invention. Additionally, fragments and variants of the above-described polynucleotides, nucleic acids, and polypeptides are also encompassed by the invention.

[0167] In specific embodiments, polynucleotides of the invention comprise, or alternatively consist of, a polynucleotide sequence in which the 3′ 10 polynucleotides of one of the sequences delineated in column 6 of Table 1C and the 5′ 10 polynucleotides of another sequence in column 6 corresponding to the same Clone ID (see Table 1C, column 1) are directly contiguous. Nucleic acids which hybridize to the complement of these 20 lower stringency conditions, are also encompassed by the invention. Polypeptides encoded by these polynucleotides and/or nucleic acids, other polynucleotides and/or nucleic acids encoding these polypeptides, and antibodies that bind these polypeptides are also encompassed by the invention. Additionally, fragments and variants of the above-described polynucleotides, nucleic acids, and polypeptides are also encompassed by the invention.

[0168] In specific embodiments, polynucleotides of the invention comprise, or alternatively consist of, a polynucleotide sequence in which the 3′ 10 polynucleotides of one sequence in column 6 corresponding to the same contig sequence identifer SEQ ID NO:X (see Table 1C, column 2) are directly contiguous. Nucleic acids which hybridize to the complement of these 20 contiguous polynucleotides under stringent hybridization conditions or alternatively, under lower stringency conditions, are also encompassed by the invention. Polypeptides encoded by these polynucleotides and/or nucleic acids, other polynucleotides and/or nucleic acids encoding these polypeptides, and antibodies that bind these polypeptides are also encompassed by the invention. Additionally, fragments and variants of the above-described polynucleotides, nucleic acids, and polypeptides are also encompassed by the invention.

[0169] In specific embodiments, polynucleotides of the invention comprise, or alternatively consist of a polynucleotide sequence in which the 3′ 10 polynucleotides of one of the sequences delineated in column 6 of Table 1C and the 5′ 10 polynucleotides of another sequence in column 6 corresponding to the same row are directly contiguous. In preferred embodiments, the 3′ 10 polynucleotides of one of the sequences delineated in column 6 of Table 1C is directly contiguous with the 5′ 10 polynucleotides of the next sequential exon delineated in Table 1C, column 6. Nucleic acids which hybridize to the complement of these 20 contiguous polynucleotides under stringent hybridization conditions or alternatively, under lower stringency conditions, are also encompassed by the invention. Polypeptides encoded by these polynucleotides and/or nucleic acids, other polynucleotides and/or nucleic acids encoding these polypeptides, and antibodies that bind these polypeptides are also encompassed by the invention. Additionally, fragments and variants of the above-described polynucleotides, nucleic acids, and polypeptides are also encompassed by the invention.

[0170] Table 3

[0171] Many polynucleotide sequences, such as EST sequences, are publicly available and accessible through sequence databases and may have been publicly available prior to conception of the present invention. Preferably, such related polynucleotides are specifically excluded from the scope of the present invention. Accordingly, for each contig sequence (SEQ ID NO:X) listed in the fifth column of Table 1A and/or the fourth column of Table 1B, preferably excluded are one or more polynucleotides comprising a nucleotide sequence described by the general formula of a-b, where a is any integer between 1 and the final nucleotide minus 15 of SEQ ID NO:X, b is an integer of 15 to the final nucleotide of SEQ ID NO:X, where both a and b correspond to the positions of nucleotide residues shown in SEQ ID NO:X, and where b is greater than or equal to a +14. More specifically, preferably excluded are one or more polynucleotides comprising a nucleotide sequence described by the general formula of a-b, where a and b are integers as defined in columns 4 and 5, respectively, of Table 3. In specific embodiments, the polynucleotides of the invention do not consist of at least one, two, three, four, five, ten, or more of the specific polynucleotide sequences referenced by the Genbank Accession No. as disclosed in column 6 of Table 3 (including for example, published sequence in connection with a particular BAC clone). In further embodiments, preferably excluded from the invention are the specific polynucleotide sequence(s) contained in the clones corresponding to at least one, two, three, four, five, ten, or more of the available material having the accession numbers identified in the sixth column of this Table (including for example, the actual sequence contained in an identified BAC clone). In no way is this listing meant to encompass all of the sequences which may be excluded by the general formula, it is just a representative example. All references available through these accessions are hereby incorporated by reference in their entirety.

TABLE 3

| | | | EST Disclaimer | | |
|---|---|---|---|---|---|
| cDNA Clone ID | SEQ ID NO: X | Contig ID: | Range of a | Range of b | Accession Number's |
| H2CBU83 | 11 | 884134 | 1-2689 | 15-2703 | BE613316, BE739453, AW961199, AV658769, BE785673, AW963999, BF037119, BG030580, |
| | | | | | BF036149, BF699154, BF033837, BF697524, BF695458, BF036638, BF701778, BG030507, AW377122, |
| | | | | | BF665913, BF699078, AW377125, BF665294, AV658829, BF667082, BG166746, AW851261, BF241480, |
| | | | | | AW850925, AI978869, BF695890, AA845339, BF668201, BF699860, BF085620, AA405940, BE612726, |
| | | | | | BF666583, BF667787, BE739116, BF665805, AW752845, BF701466, AI800939, BG121547, AI620357, |
| | | | | | BF700054, AW851052, AI924880, AW752835, AI800807, BF697582, BF700919, BF667321, AI139396, |
| | | | | | BE958619, AV692286, AI955392, AW752844, BE042841, BF698625, BF244588, AW440250, BF698345, |
| | | | | | AW152584, AW955901, AI671911, AA535832, AW850982, AI935579, BE089877, AW752868, |
| | | | | | AI683119, BF130660, D61864, AW630835, AI621153, BF514638, BF697211, AW192136, AI286255, |
| | | | | | AA403153, D62117, AW028833, N78154, BF154792, BF665821, AI538061, N64201, AW851056, |
| | | | | | AW938593, BE093579, AW938596, AA928873, AV651183, BE817020, AV657915, AV657131, BF666276, AV660141, |
| | | | | | AI699025, AI016115, R66206, N45586, D61708, BE868472, AA403241, |
| | | | | | AV657914, AA313513, AV682813, H88565, AA531589, R58698, AA857811, H42631, AA307010, |
| | | | | | R67084, BF334107, AW971385, R68027, AW021104, AW296538, BG166828, AI887214, AW468968, |
| | | | | | R64487, H88521, BF697149, R94825, R68028, R92884, R65584, AA377208, AI050980, AA318641, |
| | | | | | D62093, BF813323, N78160, T73957, D61982, D62303, D62026, AI806100, AA095925, N56560, T73925, |
| | | | | | AA507092, BF750358, BE148612, BF750357, BE867141, T73948, N88292, T73916, BE044052, H95089, H73281, |
| | | | | | AV660091, AF257182.1, AF346711.1. |
| H6EDC19 | 12 | 543259 | 1-746 | 15-760 | AI090153, AI767722, BG116691, AI797075, BF528376, AI698172, AI681570, BE671343, AI539236, |
| | | | | | AV704244, AI539246, BE264613, AA864681, AW204700, AI808925, BE676036, T79284, BF445461, |
| | | | | | AA400027, AI209219, AA300244, AA427390, AA302217, AA252421, AA406631, AI869251, BF969629, |
| | | | | | AI262951, AI498669, AA300243, AW072158, T79197, AA411721, AV682333, F34003, AI123608. |
| HACBD91 | 13 | 637482 | 1-1431 | 15-1445 | AI123694, AA203656, AV707802, BF575227, N77966, AW956121, N71852, BF732312, AI338999, |
| | | | | | AA704675, AI742966, AA176725, AV744696, AI039168, AA329423, AA680411, F10345, T85994, |
| | | | | | AV682639, AA731436, AV735262, AV733694, AA505796, AW959998, BF793146, H79631, R00088, |
| | | | | | BF978632, BG034327, AV716953, AW955313, BG032189, AV717860, AV716893, BF244606, |
| | | | | | AV733654, BG030662, AI802907, AA528524, AA973692, AA658895, AV714250, AV718258, |
| | | | | | AV716004, BF029739, F26324, AW772717, BE909294, AA370595, AI392630, BF529817, AI914394, |
| | | | | | BE748127, AA975366, BF029799, AI126532, AA977864, R38577, AI093884, AW264528, AI351443, |
| | | | | | AA916014, AA359165, AA594324, AI682171, AA404535, BG034254, T75123, AI832970, AA973611, |
| | | | | | AI833308, AI814033, BE781781, BF035996, BF036344, AA888167, BE541776, BF109665, BE551387, AI268514, |
| | | | | | AV710503, AI709250, F33691, BF216659, F33502, BE467615, AV738506, BE503802, |
| | | | | | AV763934, BG110890, AV742881, AV710956, BF965198, BG033031, T90966, R02459, F32392, |
| | | | | | BF029956, BF690853, AV764373, BE738142, BF244383, AW772766, BF978393, BF030821, BE548289, |
| | | | | | N64163, BF576733, AW872492, BE218579, BE539011, BE042987, BF978138, BE217894, BF692527, |
| | | | | | AW419258, BF219313, BF244019, R02355, BF242775, AA340839, AW440167, F30529, BE748667, AA886535, |
| | | | | | AA640120, BG179795, BF679132, BF382290, AI719390, R35603, BF240791, BF691038; AW009337, |
| | | | | | BE738709, AI253328, AW268515, BF977850, H79632, AV764541, BF214426, BE184678, |
| | | | | | BE171856, BF382191, F12739, BF031722, BE564110, F21702, BF219100, F26311, F27624, F31646, |
| | | | | | F24066, F30253, F21442, BF030470, BF215493, AA365400, AV725369, BF243623, BF216495, F23622, |
| | | | | | R38445, Z20180, F23439, BF031636, AA340808, BF246303, F29361, BF212059, D19917, BF210763, |
| | | | | | AI720401, N58379, AA706899, BE737668, F37786, AC009289.8, BC000855.1, AF044957.1, AC008804.6. |
| HAGAQ26 | 14 | 561996 | 1-1319 | 15-1333 | BF111995, BF111899, AW051348, AI807015, AA349378, AA349433, H05458, T39468, T39511, F02812, |
| | | | | | T50009, T50073, Z43427, AI372659, BE843943, BE843903, AA860404, BG015163, BE938621, |
| | | | | | BE843892, AI372657, BE698483, BF092079, BE301746, BG015653, AA496848, AL045349, BE047833, |
| | | | | | BE965724, BE965432, BE875407, BE964497, AW059713, AL037454, BE964512, AL119836, BE967307, |
| | | | | | AI918408, BG180506, BE964876, BF924856, AI683559, AW151136, BG107576, BE965067, AW268261, |
| | | | | | AI691088, AI798271, AV689111, BG253692, BE011885, AI868163, AI918634, AW084097, BE875022, |
| | | | | | BE879931, AI340603, AV728806, AL036652, BF814335, AI370392, BE963838, AV725920, AW021717, |
| | | | | | AW089036, BE877142, BE964795, AI469516, AI805638, AI925404, AA291456, AL040694, AI285439, |
| | | | | | AA888196, BE966404, BE965758, BE965355, BE544111, BG180273, AI366968, AW022682, AV742698, |
| | | | | | AI560679, AI345608, BE967149, AI366959, AI473536, BG153056, BE964614, BE540578, AI349933, |
| | | | | | AI623736, AW020095, BF038804, BE908276, AV742475, AI345471, BE966787, AI343091, AI345677, BE966011, |
| | | | | | BE965621, AI340519, AW162189, BF814357, AW198144, AI446809, AV717295, AV716613, |
| | | | | | AV682144, AI366992, AA806719, AV682099, BE964661, AA789133, BE963918, BE904051, |
| | | | | | AW023338, AV738730, BE873776, BG027082, BF032404, BG164035, BE613727, BG032219, AI863357, |
| | | | | | BF965884, AL048323, BG153050, AI636719, AV756658, AW827289, AL048340, BE879905, BG109270, |
| | | | | | AW020693, AI686576, AW858254, BE964073, AI470293, AW827290, AW058233, AL038605, |
| | | | | | BG107625, AI702527, BG260037, AW834325, BE047952, BF793031, AA643235, AI418254, AI623905, |
| | | | | | AI538764, AI524654, AI249946, BE964006, AA848053, AV733819, AA635382, H42825, AI929108, |
| | | | | | BF924884, BG029053, BE974031, AI473451, AV711509, B0252714, AL048644, BF868927, AL040241, |
| | | | | | BE883591, BF968622, AW068845, AI624293, BF813196, AW022494, BF340323, AL046463, |
| | | | | | AW020288, AI521596, AW021373, AW162194, BF915316, BF925370, BF886214, AI923989, BE965481, |
| | | | | | AI868204, AI242736, BE891942, BE735380, BF909758, AA579232, BG166687, AV715354, BE964767, |
| | | | | | AV756247, AV758825, BF814449, AL038445, BE965121, AW163834, BF343521, AW084056, |
| | | | | | BG032169, BE904851, BF868811, BG104782, AI537677, BG122101, AI628325, AI590645, BE875402, |
| | | | | | AW083804, AI561299, BE908335, AW059828, BF753056, AI559863, AV726125, BF750879, AW265004, |
| | | | | | F26535, AI583032, BF811808, AI366974, AI355765, BF822127, AI609593, AI887775, AI858865, |
| | | | | | AI500061, BG121959, AA572758, BF699668, AI348897, BE778024, BF814504, AI345224, AI357599, |
| | | | | | AV681949, T99953, AI589428, BG113851, BG110517, AL530922, AF169301.1, AC091736.1, |
| | | | | | AL442082.1, AB049853.1, AL389935.1, BC007364.1, S78214.1, X99717.1, AL122121.1, AK027161.1, |
| | | | | | BC006195.1, BC001418.2, BC005858.1, AK000310.1, S77771.1, AL389939.1, AF090900.1, AF090934.1, BC003104.1, |
| | | | | | AK025092.1, AK024524.1, AB047897.1, BC007674.1, AB044547.1, AL136789.1, |
| | | | | | BC004874.1, AL122045.1, AK026506.1, AL389978.1, AL049464.1, AF067420.1, BC007355.1, M86826.1, |
| | | | | | AB063071.1, AL110196.1, BC001293.1, BC007998.1, BC006287.1, AL096751.1, AL133565.1, |
| | | | | | AF057300.1, AF057299.1, Y10080.1, BC008387.1, AK026518.1, AL133081.1, AL162006.1, U42031.1, |
| | | | | | AK027142.1, U51587.1, AF177336.1, AK000137.1, AL157479.1, AL137547.1, AL133093.1, AB063008.1, |
| | | | | | AK025431.1, AL390167.1, BC008673.1, BC000317.1, AB047869.1, AF205861.1, BC003650.1, |
| | | | | | AL133560.1, AK024538.1, BC000799.1, AK026480.1, AF218014.1, AL049382.1, AK027182.1, |
| | | | | | AK000421.1, AK000323.1, S76508.1, BC001774.1, AB051158.1, AB047615.1, AL137523.1, AL353957.1, |
| | | | | | U58996.2, AB055303.1, Z37987.1, AB060887.1, AK026452.1, BC008025.1, AL050170.1, BC003687.1, |
| | | | | | AK026395.1, AB060912.1, AL122111.1, AB060863.1, BC005160.1, AB056809.1, AB052191.1, |
| | | | | | Y14314.1, AK026927.1, AL096744.1, AL137658.1, AL137705.1, AL137292.1, BC000778.1, BC008185.1, |
| | | | | | S61953.1, AL137283.1, AF097996.1, AL049430.1, AL390154.1, BC006164.1, AL512718.1, AL049314.1, |
| | | | | | J05032.1, AL117583.1, AB063046.1, AF110640.1, BC001349.1, AF120268.1, AK000212.1, AK000083.1, |
| | | | | | BC006180.1, AK027164.1, AB047801.1, BC007534.1, BC000556.1, BC004905.1, AL110224.1, |
| | | | | | BC007021.1, AK026462.1, AL356278.8, AF162270.1, AL050277.1, BC008070.1, AL512684.1, |
| | | | | | AB047966.1, BC006408.1, AF225424.1, AK000655.1, AB060856.1, AK025573.1, BC001056.1, |
| | | | | | AB047631.1, BC005890.1, AL137273.1, BC004370.1, AF207829.1, BC002491.1, D83989.1, BC004943.1, |
| | | | | | AF239683.1, BC005007.1, AF111112.1, AL122049.1, BC009033.1, L19437.2, AK026086.1, AB060883.1, |
| | | | | | AK026045.1, AB056420.1, AF305835.1, AB060903.1, AK026434.1, AL133568.1, AL122118.1, |
| | | | | | AL050393.1, AL137476.1, AC023880.5, AL117435.1, AK026534.1, BC000348.1, BC005678.1, |
| | | | | | AJ001838.1, S78453.1, AL136767.1, X76228.1, M64349.1, BC005151.1, AB055370.1, AB060893.1, |
| | | | | | BC001963.1, AF159615.1, AK026603.1, AL512689.1, AL133075.1, BC007680.1, AL136754.1, |
| | | | | | AK025708.1, AL050146.1, AF217991.1, AL117440.1, BC007897.1, AL136766.1, AL117629.1, |
| | | | | | BC006133.1, AK000450.1, AK026592.1, AF003737.1, AL050024.1, X69819.1, AB049900.1, |
| | | | | | AK025958.1, AK025084.1, L30117.1, AL080074.1, AB048974.1, AB063084.1, BC002471.1, BC006411.1, AK025772.1, |
| | | | | | AF090896.1, AL137488.1, BC000066.1, AK026551.1, U77594.1, BC002777.1, |
| | | | | | AL353802.14, AF271350.1, BC000632.1, AK026533.1, BC009026.1, BC003683.1, AK027096.1, |
| | | | | | AK025414.1, AB050411.1, AK027104.1, AK026353.1, BC002541.1, BC004297.1, U39656.1, |
| | | | | | AK026522.1, AB050534.1, AL136644.1, BC006440.1, AK026885.1, AK026571.1, BC003682.1, |
| | | | | | AK025541.1, AL136843.1, BC004431.1, AF132730.1, AF219137.1, AL137574.1, AF090886.1, |
| | | | | | AL136893.1, AK024944.1, AK025015.1, AL050116.1. |
| HAGDS35 | 15 | 1352199 | 1-737 | 15-751 | AI803504, AI261590, AW970422, AA430349, AI017015, AI217649, AI357214, AA425610, AW170513, |
| | | | | | N21542, AI805514, AA535732, AI922416, AI089295, AI807997, BE549761, BF434916, AI093989, |
| | | | | | AI537981, BE464016, AI128724, AA046439, AW970309, AA211360, AA974447, BE672109, BE466566, |
| | | | | | AI990335, AI655816, AI479968, AI926934, AI961572, AW970221, AW243397, AA534329, AW593487, |
| | | | | | AI283132, BF115098, AA256606, AA019380, BF061520, AA936249, AI446563, AA872374, AA011475, |
| | | | | | H25408, AI393572, AI203429, AI961183, BF735047, AW613954, AI216786, AI798452, H28374, C01415, |
| | | | | | AW016511, BE551700, AA730296, AI991488, BF476167, AA455164, AA516090, R46342, R43067, |
| | | | | | R35671, H39555, AA258077, AI950123, Z38679, AL535820, AW887425, AW958078, BE771685, |
| | | | | | AI382468, AA971129, AA090871, BF971621, AA455366. |
| HAJAN23 | 16 | 1352364 | 1-2835 | 15-2849 | BF337092, BF968693, AI949422, AL523556, BF798043, AV702522, AI423046, BE883392, BE786755, |
| | | | | | BG178390, BE408282, N31952, AA465612, AW195192, BE543143, AI564487, AV660395, BE543045, |
| | | | | | R88931, BE825704, AA658285, AW975104, AI740792, BE002027, BE928231, R89611, BG168885, |
| | | | | | BF331860, AW590726, AA641596, AA313322, BF358320, AW418507, AW842226, AI949987, |
| | | | | | AW615497, AW194161, BF222524, BF197303, BF755611, AI869038, AW243485, BF754745, AI367183, |
| | | | | | BE073382, AW013907, AF310971.1, AF301000.1, AB050049.1, AF261884.1, AC010279.4, AB050050.1, |
| | | | | | AK025591.1, AL079298.1, Z70695.1. |
| HAJBR69 | 17 | 638516 | 1-741 | 15-755 | BE262907, AW503376, AW503644, BF982382, BE079288, AW504239, AA701415, BF315343, |
| | | | | | BE277664, BF921555, BF736464, BF756620, BE720223, BE815902, AA490675, BE930704, AW971745, |
| | | | | | AW804686, AW392670, BE695785, AW861944, AW604723, AW877209, AL119483, U46351, |
| | | | | | AW858526, AW858525, AL042984, AL119497, AL119324, AL119319, AL119355, AW500561, U46349, |
| | | | | | AL134538, AL119457, BE705903, BE705906, AW577135, AW372827, AW384394, AW861889, |
| | | | | | AW858455, AW363220, U46350, Z99396, AL119484, AL119363, AL119391, U46347, U46341, |
| | | | | | AL119443, BF868687, AL119444, AL119341, BF868697, AW604726, AL119439, BF868684, BE705905, |
| | | | | | AL119522, AL119396, U46346, AL119335, AL134531, AL134533, AL037205, AL134920, AL134525, |
| | | | | | BE705904, AL119399, AL043029, AL119496, AL119418, AW861954, U46345, AL043011, AL042614, |
| | | | | | AL042975, AL043033, AL042544, AL042965, AL134542, AL042450, AL042542, AL043019, AL043003, |
| | | | | | AL119464, AL042551, AB028986.1, AB026436.1. |
| HAMFE15 | 18 | 905695 | 1-4115 | 15-4129 | AL530791, AL530792, AL529741, AL535065, AL535066, AU124538, AU133125, BG248951, |
| | | | | | BG170992, BF342607, BE791618, BE788808, BE889885, BE899228, BE266316, BF666992, AA604226, |
| | | | | | BE855814, AA858439, BF306389, AW965351, AI459262, AI949460, BE566846, AI920795, BF695661, |
| | | | | | AI628581, AI810626, AA213464, BF436958, AI765166, BF131526, AA446901, BE669483, BF105045, |
| | | | | | AA165298, AW300022, N48825, AA595754, BE218460, BF126313, AA165297, BE044264, AI686706, AW300346, BF760498, |
| | | | | | AI472286, AI804402, AA426331, AI278834, AW169453, AW239143, AA426332, |
| | | | | | H29503, AW602873, AA213575, BF376918, AV749783, AA075971, AA447021, AA074072, BE244841, |
| | | | | | AI002939, BE832901, AA598694, BE694349, AI471852, AI961851, AW136228, AI422999, AA707156, |
| | | | | | H29787, AV692260, AV692283, AV692263, BE243932, BB244952, BF330518, AV698872, AA333388, |
| | | | | | AV698900, AV691373, AV695584, AV694677, AV687965, AV696854, R13303, AA564851, AI762353, |
| | | | | | BF751566, BE244135, AV690233, AV696838, BE463584, T05291, BF878149, BE258595, N55929, |
| | | | | | AV698875, BF238880, AA348529, AV689303, T78749, BF736483, BE674953, N89249, N45617, |
| | | | | | D12186, AW961934, BF208387, AW418929, AW300980, AI522016, R91823, AW293669, W81348, |
| | | | | | AV649579, N95619, BE503239, AI739123, AK001704.1, AJ278150.1, AC004918.1, AL049792.11, |
| | | | | | AC010979.3, AC006396.1, AC005692.1. |
| HAMGR28 | 19 | 892971 | 1-1660 | 15-1674 | AL519641, AL519640, AL525613, AL526308, AL527643, AL530324, AL525663, AL525671, AL530325, |
| | | | | | AL515833, AL515832, BF313053, AL527577, BF529163, BE312001, BF984557, BF530620, BE396752, |
| | | | | | BE304484, BF983145, BE560368, BF316599, BG114646, BE269376, BF313413, BE298748, BE440179, |
| | | | | | AW953553, BF307907, AW978612, BE617303, AA845426, AI830874, AI983227, AW956917, |
| | | | | | AW410199, AW628335, BE464326, AA530876, AW452186, BE139083, AI829507, AI356849, W69111, |
| | | | | | AW084551, AA406233, AI589504, AI970964, AI420766, AI701901, AI130010, AI288363, BF571959, |
| | | | | | AI683363, BE019516, BE206283, AW272707, N23238, AA593625, AI000296, AA406505, AW593667, |
| | | | | | AI933020, AI337797, BF691989, AI139514, BF062876, W35301, AI418519, AV759081, AW514035, |
| | | | | | AW004995, AW591716, F28754, AA815275, AI347528, AI624104, AA574436, AI817434, AI025110, |
| | | | | | T08849, AL527576, AI079740, AA962799, AA707405, BF445536, F37186, AW207522, AW591663, |
| | | | | | AW263070, AW510310, AW264517, AA028008, T33149, AA723895, W69236, R40168, T23442, |
| | | | | | H88132, H78378, AW514039, D12424, W23701, F34521, Z43089, BE646197, AI475064, AA653748, |
| | | | | | AA312858, AW959275, AW410198, AI932423, AA121114, AA121036, AA295884, AA356831, |
| | | | | | AI310743, BF513002, AA381766, Z39180, R12971, AW379122, AI768799, BE877018, AI560685, |
| | | | | | AA338084, AI810799, AW861944, AW750703, F24446, AW972092, AW858525, AW877209, |
| | | | | | AW968355, AW968356, AW972093, AW968729, AW971740, AW972091, AI431351, AW972090, |
| | | | | | AW969229, AW858455, AW804686, AL119324, AI432644, AI623302, AW604723, AW858526, |
| | | | | | AI432647, AI432653, AW081103, AI432661, AI492519, BE672748, BC007438.1, AC004150.8, |
| | | | | | AF064854.1, AB026436.1. |
| HAPOM49 | 20 | 769555 | 1-1991 | 15-2005 | AL520731, AL520732, BE271092, BE271295, BF111901, AV650049, BF686278, BE840511, BF111645, |
| | | | | | AI809801, AW168904, AI809806, AW103024, AA933973, AI744944, AI588991, AI033486, AI096548, |
| | | | | | AA662523, AW468813, AI950317, AI279302, AI096696, BF239172, AW662564, AA417671, AI189300, |
| | | | | | AI753808, AA235373, AW960081, AI095057, W86920, AW189373, AI361321, BF061913, AI366754, |
| | | | | | AI218487, AI824959, AI348339, AI032926, AV659024, AA889791, BE243641, AA626261, AI338100, |
| | | | | | AA417558, W24077, AW974720, N72014, AA894657, N59290, R01247, AA235784, BE929365, |
| | | | | | BE929364, BE244396, AI275184, AI810247, W24089, R36924, AA356938, N91904, AA508411, |
| | | | | | AA649828, N91912, N99466, Z24931, H68902, BE782571, BF840140, AC004067.1, AF332892.1, |
| | | | | | AF306567.1. |
| HATBR65 | 21 | 635514 | 1-798 | 15-812 | AW754098, AV747079, AW964560, BF827304, AI697254, AA826321, AA663880, BF924786, |
| | | | | | AA772037, AV725414, AA826164, AA663006, AA826322, BE062047, AA835931, AA319870, R95053, |
| | | | | | AV760830, BF918713, BF959165, AI053538, BF930635, BE828744, AA078591, AF139781, AA491430, |
| | | | | | AA078183, AW393403, W74390, AW578861, AW393400, AA320812, BF840307, AA078213, AW752269, BF757569, |
| | | | | | AA077448, BG004304, AW793003, AA047825, AA001509, AA076683, AW857010, |
| | | | | | BE183669, BE183617, BE699552, AV720211, AW973541, BE932909, AI254770, AI284543, |
| | | | | | AI251203, AI249853, AV743864, AI251284, AW276678, AW966385, BF952670, BE707812, AI251034, |
| | | | | | AI250552, AW970571, AW869794, BE139139, AA609826, AW303098, AA552586, BF952311, |
| | | | | | AV719632, AV718487, AW905386, BE138387, AV720104, BF952747, AA015737, AW975623, |
| | | | | | BF129140, AA076784, AA604865, BG222875, AV720729, AA504818, AW905269, AV754716, |
| | | | | | AW969831, AA501867, BE042006, BF589824, W72324, BF691892, AI954192, AA610381, AA503018, |
| | | | | | AA747757, H04977, AA904211, AI912401, AI279417, BE968744, AC004084.1, AF030453.1, |
| | | | | | AC005088.2, AC004951.5, AC018720.5, AC007078.3, AC004980.4, AC007000.2, AC006480.3, |
| | | | | | AC004878.2, AC006014.2, AC007003.4, AC005488.2, AC005098.2, AC004867.5, AC004166.12, |
| | | | | | AK021477.1, AC005071.2, AC005236.4, AP000350.1, Z95115.1, AC073462.8, AC007792.1, X51956.1, |
| | | | | | Z95331.2, AC022382.3, AC087071.2, AC005291.1, AL035495.13, AL162424.20, AC002107.1, |
| | | | | | AC002106.1, Z98884.11, AF168787.1, AL157791.4, Z82215.1, AF172081.1, AC008116.8, AL008729.1, |
| | | | | | AC018809.4, AC079141.7, AC011811.42, AC006111.3, AC020558.4, AC007766.1, AL162426.20, |
| | | | | | AL139317.5, AL390838.26, AL031005.1, AL161779.32, AC004477.1, AC008392.6, AL162615.13, |
| | | | | | AC009509.7, AC003690.1, U95740.1, AL034372.33, AF196970.1, AF253417.1, AC000062.1, |
| | | | | | AL109825.23, AC024028.10, AL034553.12, AC003030.1, AL591398.2, AC005899.1, AL034400.2, |
| | | | | | AC073492.18, AC011473.4, AC005772.1, AL139316.5, AC006487.8, AC011472.7, AP001929.4, |
| | | | | | AP000963.2, AC072061.8, Z98051.6, AC005327.1, AC007225.2, AL109804.41, AC006057.5, |
| | | | | | AP001711.1, AL136984.20, AC009506.5, AL139100.9, AC008397.7, AC007199.1, AL137162.25, |
| | | | | | AF190464.1, AC009247.12, AC025430.5, AC005261.1, AC006357.5, AC005325.1, AL121880.21, |
| | | | | | AC008395.6, AP000314.1, AL353715.21, AC025166.7, AL049779.6, AL355336.15, AC011479.6, |
| | | | | | AC011495.6, AL359644.10, AC020904.6, AC004706.1, Z98044.13, AL049874.3, AC007201.1, |
| | | | | | AL161757.4, AC007130.2, AL139415.10, AC022384.4, AC008738.6, Z95114.19, AC090841.1, |
| | | | | | AC005378.2, AC022001.3, AL031848.11, AC018494.6, AL445435.11, AC002128.1, AC018811.4, AC007685.2, |
| | | | | | AL121601.13, AC004805.1, AL353777.18, AL359397.3, AC078818.19, AC007679.4, |
| | | | | | AP001781.4, AP000563.1, AP000194.1, AC007956.5, AC020633.3, AL021155.1, AC009131.6, |
| | | | | | AL359236.4, AL391839.9, AL391259.15, AL096701.14, AC008079.23, AC039056.7, AC005256.2, |
| | | | | | AL353812.13, AC004263.1, AL023553.5, AC008551.5, AC005932.1, AC079602.15, AP000133.1, |
| | | | | | AP000211.1, AJ011930.1, AL356354.10, AL163300.2, AC007066.4, AC006441.13, AC005586.2, |
| | | | | | AD000684.1, AC000134.14, AL021878.1, AC002369.1, AL032821.2, AC009510.9, AL096791.12, |
| | | | | | AC009161.12, Z82208.1, AC008641.6, AC005056.2, AL049869.6, AC023105.7, AL355312.24, |
| | | | | | AP001718.1, AL136179.15, AL078461.38, AF279660.2, AC004873.3, AC010205.5, AL353692.14, |
| | | | | | AC013726.7, AP000497.1, AC010530.7, AL133320.8, AD000864.1, Z82214.23, AL356805.5, |
| | | | | | AP000471.2, AB045360.1, AF001552.1, AL359382.23, AL450465.12, AL354815.10, AC005933.1, |
| | | | | | AL121754.18, AC018695.6, AC010618.7, AF186190.3, AE006467.1, AC002126.1, AL035681.13, |
| | | | | | AL354866.10, AC009238.4, AC007240.2, AC020946.4, AC013467.8, AC011449.6, AC004522.1, |
| | | | | | AC020945.6, AC010605.4, AL035086.12, AL049843.18, AC005231.2, AL136228.8, AL033526.24, |
| | | | | | AP002456.3, AC008080.1, AF181668.1, AC005800.1, AC011455.6, AC013355.7. |
| HAUAI83 | 22 | 639009 | 1-896 | 15-910 | BE439675, BF984328, BF978147, AW955502, BF337207, BE272543, AV757236, BE903592, BF212880, |
| | | | | | AW405217, BE743902, AI991315, AV701663, BE270100, BF681301, BG178791, BE222645, BG167626, |
| | | | | | BF132414, AW069149, BF238307, AV736544, BG255905, BF698492, BF130460, BF102497, AV745093, |
| | | | | | BE543668, AI493727, BE254068, AA934591, N24442, AI147316, BF680700, AV705947, BE734398, |
| | | | | | BG231583, BE256074, AV754408, AW014782, AI198642, BE646408, AA889969, AI709288, AW135010, |
| | | | | | AA877730, AI720901, AA496681, AA995328, AI032868, AW579254, AI186312, AI969715, AI660672, |
| | | | | | N23673, AA420567, AA427691, AI188938, AA471213, BG117664, BF102532, AI191317, AI332586, AI219152, AW000829, |
| | | | | | AI470155, AA843102, AI125390, BE312355, AW182893, AI141484, H93124, |
| | | | | | AW000718, AI268069, AA815421, AA708211, AA129884, AI023128, AI147588, AV724436, AA159902, |
| | | | | | AI129253, AA290635, AV706639, AI127280, N58266, AA315771, AI673417, AI587141, AI186000, |
| | | | | | AI142324, AI128437, AA723220, AI335350, BF687940, AA552070, AI087415, AA995933, AW300769, |
| | | | | | AA862543, AW008043, R68241, BE349483, AI241459, AI355685, AW304225, AW083014, AI277068, |
| | | | | | AI038096, AI160884, AA774420, BE407927, AA810159, W37128, W04866, AI828898, AI093015, |
| | | | | | AA732834, AV707544, AI934627, AA026633, W01678, H84951, AI279658, BF665006, AA419151, |
| | | | | | AA844949, AI096712, N71609, AV735174, N69652, AA159798, AI969153, AV729015, AA149944, |
| | | | | | N95063, AI798245, AV736793, AA771923, H20023, R99610, H50207, AA653091, N70496, AW104010, |
| | | | | | H40779, N33986, D55334, AV743438, AW130386, BF977248, AI125700, BE091971, AA572869, |
| | | | | | W00449, AI744165, AA157561, AA531221, AI275921, AA969778, H95780, N92248, AI159958, N38815, |
| | | | | | H20143, AI680770, AA305332, N77862, AV738026, N72206, AA037790, AI752109, AV743648, |
| | | | | | AA937128, AA962124, AA478395, AV741494, AV740102, H19070, R71518, H18782, R94908, |
| | | | | | BE621803, R77435, H99652, AA694460, AA641831, H21165, AW511932, AI184349, W38900, |
| | | | | | AA844297, H46188, W58208, W40195, R71470, N94261, T31343, BE620993, R70469, BE909620, |
| | | | | | N25251, AI752110, AV741554, AA165011, AA037789, H01343, AA643896, R77524, H23656, R70556, |
| | | | | | T30654, W37143, AA326924, C01763, R91937, W32075, H60231, R92265, H69010, H67121, H71491, |
| | | | | | H18688, R09629, H38970, H27857, AA558120, R94992, R09517, H75393, R99715, H23612, AA326929, |
| | | | | | AA026672, BF436567, H01135, N54428, AA186949, T32463, H59520, AA339137, H39170, AI709334, |
| | | | | | R86746, N33887, R68534, AA305400, N58289, AI351248, AA410643, AC010422.7, AF151898.1, |
| | | | | | AF059620.1, BC001192.1, T52716, T61025, T61577, R26656, R79694, H03303, H03402, H18972, |
| | | | | | H22368, R87112, H60187, H60393, H81427, H84495, N71651, W31583, AA164972, AA188345, |
| | | | | | AA419096. |
| HBAMB15 | 23 | 671835 | 1-807 | 15-821 | W27833, AI860764, AA809619, BF432929, AA768248, AI370876, AV748724, AI291737, H96013, |
| | | | | | AW051697, AI633038, AI784315, BE546233, BF980899, BF977483, AL138479.4, AL132855.4, |
| | | | | | AL121755.23. |
| HBGBA69 | 24 | 1352289 | 1-967 | 15-981 | AL520900, AL520550, AL520551, AL521649, BG029889, AV704088, AW372721, BE264987, |
| | | | | | BE906201, AL037829, BE782595, AA779652, BF724791, AW372704, AL037830, BG104612, |
| | | | | | AA722880, N21569, AA478642, AA447813, BE349318, BG254734, AI168324, BE047392, AW131642, |
| | | | | | AI590628, AA410845, AL520901, AI829611, AA447814, AI359892, AI142945, AA252189, AA974206, |
| | | | | | AI142943, AI190425, BF508776, BE350039, D59872, AI446645, AI335769, AI268764, AI077663, |
| | | | | | AA776515, AI806892, AI085888, AW083118, AA554318, AI439022, AI373036, AA302641, W73952, |
| | | | | | N42730, AV683614, AA594115, AA936827, AI249488, AI917956, R66420, AW511599, AW151261, |
| | | | | | AA861454, AA235619, W77995, W73457, BG164250, W73178, D59873, BE907089, AA678939, |
| | | | | | BF767379, AA447665, AI050013, H43132, AI367631, AI433148, AI693776, AA156886, BF872750, |
| | | | | | AI868651, W93317, H42365, AW960535, AA383684, AA843578, AI215882, C21518, AA479185, |
| | | | | | F21903, AI274524, AI015576, AA421010, AA766077, AA625709, AA535245, AA303411, AW265759, |
| | | | | | AA339998, AA356903, AA325207, AL044300, AW372719, AA927039, AA401731, AA336082, |
| | | | | | AA811142, AA433985, AA742390, AA603705, H84185, AA157195, AI910669, AW273621, BG170969, |
| | | | | | AA916824, AI057210, AI028476, AI582763, AI440289, AA496243, AI721078, AA634528, AI682063, |
| | | | | | AA621271, AA827896, AA776421, AI051711, AW303838, AI636557, AL044011, AA961201, AA815460, |
| | | | | | R06079, AI076520, AA773592, BF736165, AA768150, AW170714, BE171275, T24558, AI222486, |
| | | | | | AL521648. |
| HBIAE26 | 25 | 514418 | 1-1024 | 15-1038 | AW237905, AI635440, AL079734, AV729929, H73550, AI669421, BE092488, AC004076.1, |
| | | | | | AY030284.1, AL139353.3, AC008569.6, AC011479.6, AL031659.9, AC083865.2, AL353807.18, |
| | | | | | AE006464.1, AL136979.16, AL163032.3, AC019097.5, AC015651.18, Z93023.1, AC011484.4, |
| | | | | | AC013449.8, AC005015.2, AC006120.1, AC084865.2, AC022116.5, AL512449.6, AL109797.18, |
| | | | | | AC005736.1, AC006008.2, AL022336.1, AC006329.5, AC002302.1, AL357515.26, AL035669.43, |
| | | | | | AF288742.1, AC005522.2, AC005840.2, AC021016.4, AC078962.30, AP002851.2, AL138787.11, |
| | | | | | AP001695.1, AL160269.14, AC005512.1, AL034420.16, AL354932.26, AC005088.2, AC011500.7, |
| | | | | | AC008666.5, AC010404.5, AC000353.27, AC011469.6, AL139384.16, U91321.1, AC005355.1, |
| | | | | | AL024498.12, AC008755.6, AC020552.4, AC008641.6, AL356970.21, Z97876.1, AC005046.3, |
| | | | | | AL022326.1, AC007388.3, AL451075.15, AL390374.16, AC026431.3, AC011497.6, AC009120.8, |
| | | | | | AC010267.6, AL158207.15, AL590762.1, AL137229.4, AL135978.4, AL133454.6, AC008901.5, |
| | | | | | AC008752.6, AC002045.1, AC006211.1, AP002982.2, AC002301.1, AC004106.1, AC004089.25, |
| | | | | | AP001752.1, AL138733.15, AC006449.19, AL121992.24, AC015550.18, AL035420.15, AC067941.7, |
| | | | | | AC004900.2, AC008786.6, AL109743.4, AL121578.1, AC018639.8, AP002812.3, AL033383.26, |
| | | | | | AC010913.9, AC024561.4, AC010618.7, AC0209 16.7, AL157877.11, AC018758.2, AL035071.17, |
| | | | | | AC002470.17, AC004922.2, AL035422.12, AC006597.2, AC011236.8, AC006480.3, AC007597.3, |
| | | | | | AL357315.14, AC000360.35, AL353135.32, AC022217.5, AC005531.1, AC008946.6, AC008264.10, |
| | | | | | AL049539.21, AC008655.6, AL138784.30, AC006538.1, AF129075.2, AL356257.14, AL034417.14, |
| | | | | | AC008440.8, AC005920.1, AC009131.6, AL121826.11, AC005480.3, AC083871.2, AL139385.12, |
| | | | | | AC007683.5, AC011452.6, AC008155.9, AP000555.1, AC009470.4, AC005077.5, AF064861.1, |
| | | | | | AL139809.16, AB003151.1, AL136105.9, AL049776.3, AC008745.6, AL031774.1. |
| HBINS58 | 26 | 1352386 | 1-829 | 15-843 | AI827239, AW104045, AL536345, AL096774.9. |
| HBNAW17 | 27 | 526797 | 1-587 | 15-601 | AA713518, AA807610, AW104604, AA830415, AW975518, AL138824.19. |
| HCE2F54 | 28 | 634016 | 1-1262 | 15-1276 | AL530657, AL534642, AL519887, AL519439, BE257752, AA769913, AI609266, BE674973, AI652143, |
| | | | | | BG057242, BE046399, AI669608, AU157638, BF347064, BE046435, AI571552, AA406626, AI634414, |
| | | | | | AW731848, BE245626, AI372990, AW473891, AU153165, AA969877, AI458122, AA402109, |
| | | | | | AU157487, AI815017, AA936365, AA481847, AI052565, AA704608, AI860561, BE736308, AI591232, |
| | | | | | AA425187, BF685966, AA479747, AI922541, AA889587, AA992245, R47377, AV694506, AA707462, |
| | | | | | AA283778, BF589042, AI767815, AW439290, AI354234, AW630387, R82068, BF829195, BG152634, |
| | | | | | AA229272, BE246763, AI745410, AW074728, AI867440, AA405028, AI652744, AI799388, AW732540, |
| | | | | | AA724063, AI249812, R43967, BE247615, AA229721, AA290883, AA477093, BF847615, AW117313, |
| | | | | | AA425298, AW804421, AV661367, AW627358, AA456146, W45494, R82878, R82020, F35061, H01485, |
| | | | | | AW014040, F25139, AA339640, AI961334, AA478233, AA362857, AA326205, BE244646, AA229827, |
| | | | | | AA377429, AI186501, BG008599, BE242784, T32225, AV686564, AA688260, AI085847, AV686569, |
| | | | | | BE157547, AA860204, R08559, F09429, AA405272, BF845336, BF380796, BF380795, AI860044, |
| | | | | | AA883556, AA032260, AA332516, AA402982, AA332325, BE157532, AA336006, Z39018, AI695855, |
| | | | | | AI589935, AI583010, AI954634, BF841145, AW469249, F04759, AA032193, F04962, AI524382, |
| | | | | | BF922668, BE157535, H01586, AI298047, T89862, AL530658, BF883965, BF374266, M78413, |
| | | | | | BF883968, AW197535, AW952615, BF847600, AW007397, BE157466, AI907687, AI632570, AL519888, |
| | | | | | AK023173.1, BC007642.1, BC007864.1. |
| HCE3G69 | 29 | 728432 | 1-2070 | 15-2084 | BE740754, BF339727, BE740538, BE277589, BE382940, BE618822, BE793142, BE390135, BF530091, |
| | | | | | AW969581, BF315345, BF340007, BG164152, BE618316, BE277504, BE740158, BE542020, BF527796, |
| | | | | | BF796337, BF310510, BE409091, BE545069, BE312476, AI979049, BF314374, AI828148, BF528364, |
| | | | | | BF341988, AA987262, AA789210, BE783336, AA552222, BE042994, BE408361, AA542834, BE262213, |
| | | | | | BF724352, BG170449, AA399248, AI399975, AA682879, AA709002, AA628073, AA523036, AI281261, |
| | | | | | AI749652, AI148325, BE297932, AI347619, AI206709, AI857651, AI304965, R77325, AI523697, |
| | | | | | AA349818, T16002, H56978, N95160, AA351179, BF736456, BF919187, W16789, R61061, AA994296, |
| | | | | | BE872104, AW131936, T77786, BF805555, R42239, AI001897, R49103, H27917, AI216183, BF435415, |
| | | | | | AA349337, AA293132, AA349338, H47705, BF690107, BE909738, BE831416, T87999, R77274, |
| | | | | | AA017080, AA293765, H47615, W21536, R64334, H56891, BF813356, BF957635, BE827070, AI560786, |
| | | | | | R64335, T77787, AW380761, AI027520, AW380835, AI870267, AI263580, BE563729, AA324593, |
| | | | | | AA588228, AW955408, AI277032, R18259, AI566653, T33783, AW883586, D53543, BG105324, |
| | | | | | AW452975, R60940, H41337, R36021, T32921, BF895461, AI360103, AW380828, BE256741, |
| | | | | | AA057061, AI564056, AW327298, AI244916, W35216, BE262875, AL040896, BE501695, BE351024, |
| | | | | | BF058407, BE263311, T15786, AA812926, AA830661, BE693588, AI797886, BF314562, AA299346, |
| | | | | | AW451523, BF337822, AI520932, D80870, AA333807, AA058540, AW363994, AW604788, AW820702, |
| | | | | | AW820474, BF848412, BF312802, BE171868, AW604793, AW273608, AA610114, AA865732, |
| | | | | | AW363958, AA524542, AI089686, AA359625, W23626, D20577, AI150519, W31778, AI150517, |
| | | | | | AW997867, AV704757, AV706824, AV705873, BC002420.1, AL136758.1. |
| HCE5F43 | 30 | 612796 | 1-1751 | 15-1765 | AL525531, BG034956, BE858832, BE897817, BF510434, BG253874, AI656560, AI628821, BF215392, |
| | | | | | BF244940, AI097077, BG235906, AW954960, AU160122, BF245375, BF977858, AU155177, AI470134, |
| | | | | | BF224262, AU150756, AU149864, AW473477, AI955730, BF248416, BF448271, BF154789, AI378490, |
| | | | | | AI800985, AW069497, AI034459, AA156289, AI073518, AI697128, BF030327, AU155857, AA233239, |
| | | | | | BF102934, AU156440, AI573091, AA135491, BE222305, N47760, AA447203, BF086535, AI160238, |
| | | | | | N99672, AU154967, AI963320, AA234550, BF574918, BE930107, AI799196, BF241316, BE928494, |
| | | | | | AA256954, BF084221, BF084272, N34505, BF086530, AW362473, AA046377, AA251743, AW362472, |
| | | | | | N79724, BF084201, AV720349, N42280, BF084190, AA251841, AA256955, BF086505, BF086503, |
| | | | | | N71937, AI167179, AA235408, AA704119, R62459, AA568672, BE928500, AA773818, AA256646, |
| | | | | | BF094389, AA112337, BF086529, R25715, AA417904, AA256645, AA320096, AA236661, AI525894, |
| | | | | | BE961214, BF758245, N62776, BF185469, BF511940, AA233163, BF084203, N71943, BF086500, |
| | | | | | D61858, AW188824, AI563986, BF695980, AL525580, BF086533, AI611807, BF086496, AU136037, |
| | | | | | BF114811, BE536773, AK023459.1, AF063600.1, AB056410.1, AB050431.1. |
| HCEFB80 | 31 | 1143407 | 1-2480 | 15-2494 | BF343021, BF339312, BF341481, BF967606, BF344530, BF344213, BF513319, AI393526, BE857064, |
| | | | | | AW016800, AI937454, AI370995, AW170034, AA416907, AW044650, N75664, BF341415, AW960857, |
| | | | | | BG222497, AA703765, BE855450, AU146334, AA703342, N64813, T23840, AA446784, AA228781, |
| | | | | | M86149, T08275, AA386225, AA417008, AI671567, T15689, AW128975, AA432098, H83023, M85314, |
| | | | | | AJ277779, BG222958, BF923571, M79106, BG152559, R13095, R11764, R21361, BF921573, F05369, |
| | | | | | T28040, T10247, AA323697, AI361427, AW235399, AI352392, T10246, R37689, AW594074, R40527, |
| | | | | | H82804, N59328, BF894586, R46460, T15861, BE672078, C14288, D25217.2, AF319633.1, AL022327.17. |
| HGEWB20 | 32 | 543370 | 1-871 | 15-885 | T51653, AW168798, BG059728, AW151307, AA189081, AL133942, AI924175, AI610776, AI034217, |
| | | | | | AI479035, BE165748, AI811494, AW090210, AA346162, AW167452, AI687804, AI749571, AA470572, |
| | | | | | AW089655, AI197934, AI827133, AU144339, N64574, AA470493, AI697247, AI937684, N76274, |
| | | | | | AI984510, AL047920, AA223830, AA493998, BE176566, AV730063, T62931, BE148908, AA876415, |
| | | | | | AI801377, AW589501, AA085707, AW177317, AI439860, AI813517, AA581340, AI858607, AA099491, |
| | | | | | AA613244, AI887321, AA643785, AA633390, AU143906, AV719347, AI362951, W58428, AU146966, |
| | | | | | AA847621, AI564253, AI921101, AL041417, AA643823, AI567544, AI733077, AW177120, AI561208, |
| | | | | | AI264673, BE158597, AU145674, AA130536, AA694579, N74502, N54295, AW440317, AF063514, |
| | | | | | AU119100, AA873103, AW177237, AA160519, AA197059, AW177231, AW177264, AA598786, |
| | | | | | W49501, AA911409, N26540, BE264670, AL036881, AU146974, AA493751, AW994225, C17730, |
| | | | | | AA724159, AU145383, AA157033, AA041332, AA166854, H96719, AA055654, H65500, AA219480, |
| | | | | | AU148220, AI935333, AL523955, AI132962, AW084901, N48690, AI862874, D29455, AA598990, |
| | | | | | BE044603, AF074627, AV730577, BG235936, AA878800, R94112, AW275729, AI376984, AI951835, |
| | | | | | AA101456, AA503213, AW440351, AI735074, AW177266, BE904846, AA846188, AW177226, |
| | | | | | BE152426, AA493735, AA593081, AW615437, AI538654, AA404968, AW813744, AA669580, F03370, |
| | | | | | AA350922, AA356989, AI421079, AV728282, AW771706, N76124, AI189033, AA584498, AI961771, |
| | | | | | AA953572, AV719696, AA467957, H04879, BE159220, T69889, AV720543, H97020, AA467904, |
| | | | | | AW074001, AF282520.1, AC073310.7, AK026100.1, AL030995.1, AL445236.22, AC023160.31, |
| | | | | | AK027219.1, AC003977.1, AC008945.6, AJ271735.1, AC012172.6, AL161415.2, AL139125.18, AC002217.1, AC023892.35, |
| | | | | | AL512629.7, AC069228.26, AC011998.8, AP000075.1, AC008651.7, AL133238.3, |
| | | | | | AL359816.16, AL121694.4, AP000639.4, AC004029.1, AL121757.7, AC002349.1, |
| | | | | | AC027304.3, AC004397.1, AF003627.2, AC018637.3, AL355615.12, AB038653.1, AC011755.7, |
| | | | | | AC022468.5, AL133325.20, AL356113.8, AL121986.12, AC004636.1, AL356213.10, AL390023.8, |
| | | | | | AC008496.5, AC009812.17, AL136374.4, AC007388.3, AC005280.3, AL133404.8, AC012309.7, |
| | | | | | X14975.1, AL133240.3, AL158069.16, AC011310.3, AL356782.14, AL158055.12, AC010285.4, |
| | | | | | Z84482.1, AL359950.4, AL034428.4, AC010145.9, AL441887.9, AC003085.1, Z83836.2, AC025420.26, |
| | | | | | D86996.1, AC007392.3, AC007207.22, AC020717.3, AC022316.18, AF002532.1, AC012323.7, |
| | | | | | AC026413.5, AL590792.1, AL031387.4, AC022083.6, AL512885.4, AK021525.1, AC005614.1, |
| | | | | | AC008162.3, AL136170.12, AF248484.1, AL033524.11, AC079175.24, AC007051.3, AF127577.2, |
| | | | | | AC016396.5, AL132715.3, AL359398.2, AP000626.5, AC073095.3, AL353580.7, AL354758.14, |
| | | | | | AJ251973.1, AL034545.1, AC004551.1, AC068812.13, AP001669.1, AL590404.5, AC010276.6, |
| | | | | | Z73497.1, AC013355.7, AL031775.1, AL049570.11, AL590387.7, AC008518.3, AC003670.1, |
| | | | | | AL160236.4, Z95114.19, AC025212.5, AC017060.7, AL031224.1, AF127936.2, AC004703.1, |
| | | | | | AC018641.3, AC009037.6, Z81007.1, AL365179.30, AL031321.1, AL158841.6, AC007917.15, |
| | | | | | AL031320.6, AC005730.1, AL049589.15, AL121775.3, AC004692.1, AC007671.7, AC012531.11, |
| | | | | | AC003686.1, AL121833.10, AC003687.1, AL138807.12, AL136382.6, AC011752.2, AL445246.4, |
| | | | | | AB045358.1, AL356108.12, AC005157.1, AC017088.8, AC006004.1, AL450333.13, AL031119.1, |
| | | | | | AC004998.2, AC073141.4, AC003961.1, AL133211.9, AL445239.8, AL356005.9, AL133462.23, |
| | | | | | AF170702.1, AC005250.1, AL159990.12, AC087083.2, AC026351.28, AL159976.9, AL034407.1, |
| | | | | | AC003666.1, AL137016.11, AC017099.11, AC003955.1, AC063951.22, AC008038.1, AK021760.1, |
| | | | | | AL023773.1, AF128525.2, AC024057.4, AC087187.1, AC010411.6, AL392166.19, AL163207.2, |
| | | | | | AC007907.2, Z98036.1, AC087258.14, AC007502.5, AK024101.1, AL035671.5, AC019197.7, |
| | | | | | AC007870.3, AF303386.1, AL161426.7, AL132639.4, AL512363.11, AC068723.5, AC020637.9, |
| | | | | | AL360294.11, AC010365.5, AL354943.9, AL445468.8, AL109854.10, AC004070.1, AC004650.1, |
| | | | | | AC073130.3, AC026214.3, AC087092.1, AC005747.1, AC006565.4, AL034417.14, AC010583.5, |
| | | | | | AL109742.12, AC013602.4, U96409.1, AC009225.3, AC008561.4, AP002448.3, AP000457.3, |
| | | | | | AF128894.1, AC008083.23, AL359704.9, AL118519.25, AC010632.6, AL160397.17, AC007631.3, |
| | | | | | AL157791.4, AC018696.4, AC004043.1, AC000126.1, AL445310.9, AL049177.5, AL162414.11, |
| | | | | | AL512348.8, AC004825.2, AL161938.6, AL355381.11, AL355852.23, AC007551.1, AL136315.9, |
| | | | | | AP002982.2, AL356311.6, AL161804.4, AC018833.3, AC079631.16, AL360270.18, AC020905.8, |
| | | | | | AL117381.32, AC007001.2, AL136129.23, AL109942.13, AL109656.10, AL157933.19, AB043547.1, |
| | | | | | AL390237.9, AC025519.10, AL359197.20, AC005284.1, AP001331.1, AL391495.16, AL451146.7, AL035494.8, |
| | | | | | AL353788.33, AL163953.3, AC004189.1. |
| HCGMD59 | 33 | 636078 | 1-776 | 15-790 | AI346379, AW009453, AA477432, AA152289, BE219294, T27069, AI745607, AW852105, AI807602, |
| | | | | | AA234651, AA024744, BE219304, AA065244, N91858, AI242569, AI091032, BF977615, AI251849, |
| | | | | | H88431, BE301616, N50522, BE762367, AW607675, F03857, H41152, BE696404, R45373, BE070278, |
| | | | | | H88369, AL039156, AU133046, AL038837, AL039074, AL039564, AL039109, AL039108, AL037051, |
| | | | | | AL038531, AL039659, AL039625, AL039648, AL039629, AL039678, AL039150, AL039128, AL037726, |
| | | | | | T79771, AL040992, AL036725, AL045337, AL042909, AL039423, H53427, AL039410, AL045353, |
| | | | | | AL037526, AL036973, AL044407, AL039538, AL039386, AL044530, AL036196, AL039924, AL039566, |
| | | | | | AL039509, AL038025, AL039085, AL037639, AL038821, AL036767, AL043423, AL045341, AL037615, |
| | | | | | AV743601, H53426, AL043422, AV746102, T24119, T24112, AW975143, AV758878, AL036238, |
| | | | | | AL043441, AL036117, AL043445, AW013814, AV718844, Z99396, AV738934, AL045794, N91869, |
| | | | | | AV737584, AW973101, BF294063, BF508972, AV743654, AL036924, AW975229, AW979144, |
| | | | | | AI535983, AV17989, AV717980, AW451070, AV701782, AV718018, AV7 17988, AV731085, |
| | | | | | AW973200, AV701012, AV718016, AV717959, AV717984, AW064110, AV718023, AI002696, H00069, |
| | | | | | AW607606, AV735727, AV717963, AV717962, AV720464, AL036733, AV745724, AV701118, |
| | | | | | AV717966, AV745723, AV718002, AV719000, AV700229, AV699447, AV745917, AV745080, |
| | | | | | AV717956, AV717960, AL036679, AV718858, AL037027, AV745350, T23947, AW975161, AL038851, |
| | | | | | AV717983, AL037054, AV701017, AV718681, AL037082, AW976625, AL036765, AW975163, |
| | | | | | AV717965, AL036418, AL036190, AV717941, AV740535, AV701043, AV701163, AV742995, |
| | | | | | AV701154, AV719568, AV717970, AV745392, AV717978, AL036158, AL037177, AW975203, |
| | | | | | AV717990, AV722801, AV742720, AI174488, AI634005, AW973189, AW975925, AL037021, |
| | | | | | AV717942, AV717955, AV717992, AW969322, AW979228, AW970679, T02921, AV745488, AL036191, |
| | | | | | AV717968, R47228, AV701261, AV743008, AV746162, AV717972, AW975312, AW969383, AA150231, |
| | | | | | AL036964, AL037085, AV718006, AL036998, AL036133, BF438013, AV741012, AV718010, |
| | | | | | AV717945, AV718021, AV717971, AW979128, AV717964, AV724520, AJ293456, AW973190, |
| | | | | | AV718020, AW975607, AV723927, AV744768, AV746335, AL036858, AW452756, AV717961, |
| | | | | | AV718001, AI535783, AL037178, BF509207, AV742667, AV717986, AV717949, AV718008, AV745369, |
| | | | | | AV717985, AV717946, AV717958, AV717967, AL037643, AV701166, AV741888, AL037047, |
| | | | | | AW979252, AV717974, AL036163, AW971000, AW063533, AV720607, AV744770, AV718017, |
| | | | | | AV717993, AV718013, AW972784, AA961091, AW681208, AV701332, AV742001, AK000326.1, |
| | | | | | AL139286.13, AF093097.1, AF271371.1, Z96142.1, X73004.1, AJ244003.1, AJ244004.1, AJ244005.1, |
| | | | | | Y11926.1, D14548.1, Y11923.1, D34614.1, L27636.1, S83538.1, M32676.1, S65373.1, S78798.1, X73003.1, Y11920.1, |
| | | | | | S85459.1, X92518.1, U50871.1, AB026436.1, D61405.1, T87293, H41179. |
| HCNDR47 | 34 | 1016919 | 1-1329 | 15-1343 | AI621217, BF222897, AA632651, AI950250, AW139452, AW207039, AA505117, U69203, AI949187, |
| | | | | | AW953975, AI160725, BE348367, AI631345, AA707909, AA535510, BG059719, AI680791, AI700776, |
| | | | | | H17406, AA524577, AA062981, AA365529, H16756, AI699070, AW970783, BE858688, AI696027, |
| | | | | | BF766585, AV709230, BE220337, AW194354, AA365530, AA678861, BE707377, AL122003.17, AB007895.1. |
| HCNSM70 | 35 | 637547 | 1-1075 | 15-1089 | AW170355, BF437750, AA781956, AA304933, BG260457, H48606, AW517161, AA088807, BE004003, |
| | | | | | AV654505, W61215, H77296, AI185059, AW150806, W60968, AA447295, BF340135, AA336903, |
| | | | | | BE140648, AA857929, AW572088, AI220250, AW827119, BG122481, AI633419, BF726207, AA580663, |
| | | | | | AW071417, AI345745, AI886123, AV681726, AI358701, AI698401, AL135661, BG168549, BG113188, |
| | | | | | BG179993, BF727034, BG178911, AW148356, BF970449, AW020095, AI478123, AL079963, AL036396, |
| | | | | | AA292158, BE904051, BF764516, AI783997, BF816037, BE785868, AV681618, AI500706, BF904265, |
| | | | | | BG114104, AI927755, BF970768, AV693410, BG110517, BF812933, BG121959, AI538764, AL036146, |
| | | | | | BG107576, AL039086, BE965432, BE047833, AW673679, AL537364, BF827575, AI537515, BF814420, |
| | | | | | AI312428, BE964614, BE895585, AV682414, AI923989, AI866770, AI345347, AW059828, BG165051, |
| | | | | | AA833760, AV755793, BE964981, AI863321, BG035511, AI521012, BG179633, AW806761, BF812936, |
| | | | | | AI251221, AW022682, AL119863, AI859464, AW129106, AI282355, AI699865, AV704696, AW935969, |
| | | | | | AW946806, AV682001, BF338465, BG058150, BF527014, AW074993, AI349614, AW022699, |
| | | | | | BF338002, BF904244, BG034550, BF970990, AL038504, AW051088, AI886192, AA572758, AL036631, |
| | | | | | AI349256, AI312152, AW269097, BG030364, BF753056, AL119049, AV682510, AW075084, |
| | | | | | AW073697, BG109270, BG163618, AI349937, AW983691, AV746964, AI921248, AI611738, AI334884, |
| | | | | | AI307543, AI348897, AI619502, AI677796, AI632408, AI886181, AW079572, AW071412, AI802542, |
| | | | | | AI307708, AI620089, AA449768, AI863382, AI288305, AI312325, AW118518, AI499285, AI340659, |
| | | | | | AW983829, AI886753, AI873644, AI570807, AW168485, AI933589, AW026882, AI635067, AI923370, |
| | | | | | AW130930, AI336495, AW268072, BE138658, AI783504, AI868931, AI784230, AW149925, BF812960, |
| | | | | | AI537261, BF885000, AI432040, BE047852, AI620284, BF812938, AI334930, AI309443, AL038605, |
| | | | | | AI445992, AA908294, AI445990, AI307520, BF970652, AI284517, AI345737, AW269098, AI434741, |
| | | | | | AW151138, AI308032, AW268251, AI538342, AI433157, AL514879, AI345739, AI702073, AI312143, |
| | | | | | AL036802, AI345736, AI366992, BE908921, AI344785, BF812961, BG256090, BE880923, BE536058, |
| | | | | | AI801325, BF032768, BF856052, AL036403, AW198144, AW193134, AV716613, AI349955, BF054789, |
| | | | | | AW827276, AI364788, AW075093, AL036980, AI499986, AI500061, BE789764, AI590120, AI312357, |
| | | | | | AL047422, BE886827, AW268768, BG150947, AI500662, AI890907, AI633125, AI589267, AI698391, |
| | | | | | BE541445, BF885675, H89138, AI500523, BF343172, AI915291, AW152182, AA640779, AL036265, |
| | | | | | BG029667, BG168185, AI582932, AI554245, BG108406, BF814516, BG180996, BF339594, AI335426, |
| | | | | | AF304447.1, AF275945.1, AF030455.1, AK024538.1, U58996.2, AK000486.1, AK027114.1, BC004958.1, |
| | | | | | AK026045.1, AL389939.1, AL512733.1, AK000083.1, AL157482.1, S78214.1, AK026741.1, |
| | | | | | AK025484.1, AL049430.1, AF210052.1, U42766.1, AL512718.1, AL049382.1, AB047801.1, BC007326.1, |
| | | | | | X69819.1, AB056809.1, AK026593.1, AL133072.1, AK024524.1, AK026504.1, AF218031.1, |
| | | | | | AK026784.1, AL136843.1, AB052200.1, AL157431.1, AK027868.1, AL049300.1, AL050024.1, |
| | | | | | BC003684.1, BC009033.1, AB060908.1, AL137292.1, AK025491.1, AL136799.1, BC008280.1, |
| | | | | | AL359601.1, BC008488.1, AF104032.1, AF078844.1, AK027113.1, AL162008.1, AL137550.1, |
| | | | | | AB060929.1, AK027116.1, AK026534.1, AB055315.1, AL137526.1, AK024588.1, Y16645.1, |
| | | | | | AL122050.1, BC008899.1, AK026959.1, AF177336.1, AL512719.1, AL359615.1, AL117394.1, |
| | | | | | AL133560.1, AL050393.1, AL122121.1, AB052191.1, BC006807.1, AL512689.1, AK026608.1, |
| | | | | | AK026600.1, BC006525.1, AL110225.1, AL133606.1, BC008983.1, AK026464.1, X82434.1, BC005890.1, |
| | | | | | AK026086.1, BC002839.1, AB055374.1, AL136540.1, AB055368.1, AL512765.1, AF056191.1, |
| | | | | | AL512754.1, AK026592.1, AK000137.1, AK025414.1, AB056420.1, AL096744.1, AF162270.1, |
| | | | | | AK026855.1, AF057300.1, AF057299.1, AL136749.1, AL133067.1, AL122049.1, AB063008.1, |
| | | | | | AB048974.1, AL162006.1, AL512746.1, AK026630.1, AL110221.1, AL117457.1, AL133016.1, |
| | | | | | AK025772.1, AL050108.1, AL122093.1, AF230496.1, AL512750.1, AK026526.1, AK026480.1, |
| | | | | | BC002643.1, AL117583.1, AJ242859.1, AK026927.1, BC007199.1, AL080060.1, AK026528.1, |
| | | | | | AK026629.1, U39656.1, AB060916.1, AK026462.1, AF146568.1, X98834.1, AF285167.1, AK000652.1, |
| | | | | | AB060912.1, AF090934.1, BC008070.1, AB060826.1, AB048953.1, AK026597.1, AB063070.1, |
| | | | | | AK000445.1, AK026642.1, AL137271.1, BC005168.1, BC004951.1, AK026744.1, Z82022.1, AF217987.1, |
| | | | | | AK027204.1, AL359618.1, AB060852.1, AL080127.1, AF090900.1, AF090903.1, AL049464.1, |
| | | | | | AK025524.1, AL137533.1, AF111847.1, AL353940.1, BC004556.1, AF090901.1, AB062978.1, |
| | | | | | AL136787.1, BC008387.1, AJ012755.1, AK026865.1, AF097996.1, AL133093.1, AF051325.1, |
| | | | | | AB047615.1, AK025958.1, AK026506.1, AL080074.1, AF113222.1, AK025312.1, AK026452.1, |
| | | | | | AL050116.1, AK025254.1, BC007021.1, AL442072.1, AL137527.1, AF106862.1, AL136805.1, X53587.1, |
| | | | | | AL136928.1, AL049466.1, AF353396.1, BC003683.1, AL137478.1, AK025906.1, BC001967.1, |
| | | | | | AB047904.1, AL359596.1, AB063046.1, AL137459.1, AK026762.1, AL117460.1, AK025798.1, |
| | | | | | AL133075.1, AL136789.1, AL117440.1, AK000391.1, AL050277.1, AL117432.1, AL049452.1, |
| | | | | | AL049283.1, AK026353.1, AK025209.1, AL133098.1, AB055366.1, BC001045.1, AB048975.1, |
| | | | | | BC003687.1, AB055361.1, AL133113.1, AB056768.1, AL117435.1, X65873.1, AL133565.1, U91329.1, |
| | | | | | AL080124.1, AL162083.1, AK026583.1, AL390154.1, BC008417.1, AL137560.1, AL133640.1, |
| | | | | | AK025084.1, AB048954.1, AL136635.1, AK025092.1, AB062938.1, BC002733.1, AL136768.1, |
| | | | | | AF262032.1, AF090896.1, AL136845.1, AL136892.1, AL137521.1, BC008365.1, BC009341.1, |
| | | | | | AF061943.1, AL122110.1, AL359941.1, AK027096.1, AL512684.1, AL110196.1, AF217966.1,AL133080.1, AB051158.1, |
| | | | | | AK000432.1, AL162003.1, AB050510.1. |
| HCUIM65 | 36 | 550208 | 1-861 | 15-875 | BE781101, BE540200, AI972511, BE300952, AA464837, BG150212, AI681901, AW172458, AA099207, |
| | | | | | AW205564, AW408650, AW205714, AA450308, AA636047, AI656442, BF437116, BE466112, |
| | | | | | AW575656, AW962721, AW206882, AA099221, AI620473, AA369585, AW469939, AW136836, |
| | | | | | BE547752, AI638262, BF059133, AA236642, BE551958, AW086133, AI917742, AI623315, AC005391.1, AL445584.16 |
| HCWDS72 | 37 | 707833 | 1-306 | 15-320 | |
| HCWKC15 | 38 | 553621 | 1-696 | 15-710 | AW504485, AI380617, AW805539, AV758903, AL079734, AA916430, AW819125, AV762982, |
| | | | | | AI62504, AI792575, AW084445, AW975210, BE138594, AW069227, AW023111, AV764259, |
| | | | | | AI792521, BE501593, AW021583, AI890324, BF725844, AW438542, BE138509, AV763026, AV763058, |
| | | | | | AA904275, AI521525, AA665330, BE077105, AA501461, AW969743, AW327591, AA535216, R94326, |
| | | | | | BF589824, AA574442, AW338179, AW271904, AI279417, AA651639, AI859946, AA524616, |
| | | | | | AW020150, AA833896, AV761862, AL042373, BE968744, AW004884, BF528591, AV760019, |
| | | | | | AA610509, AU131037, BF804385, AA833875, BF725761, AI053688, AI923052, AV761714, AI821714, |
| | | | | | AI792133, AI791913, AA013168, T74524, AI355246, AW474168, AI284543, BF724838, AI912401, |
| | | | | | AW068596, AV762633, AI564209, AW975626, AI620992, AI821785, AA483606, AV756220, AV754716, |
| | | | | | AA533176, BG236628, AI491765, H05940, BE139139, AA504906, AI250552, AA019973, BE049032, |
| | | | | | AA223174, AI798449, AA570740, BF965775, AL022238.1, AC006329.5, AL359402.3, Z98304.1, |
| | | | | | AC006948.4, Z84487.2, AC006312.8, AC026749.5, AC010627.5, AC008623.4, AC016656.5, |
| | | | | | AC016652.5, AC005531.1, AC004675.1, AC006057.5, AL033383.26, AL132768.15, AF088219.1, |
| | | | | | AC004849.1, AL031904.1, AC079177.21, AC007318.4, AL035659.22, AC074013.5, AC005829.1, |
| | | | | | AL035252.5, AL590762.1, AC005668.1, AC007216.2, U95742.1, AC005480.3, AF196969.1, |
| | | | | | AL158207.15, AC078846.2, AL121655.1, AC008754.8, AC011443.6, AC007191.1, AC008747.5, |
| | | | | | AL445217.3, AL161911.17, AC006515.7, AL034449.1, AJ010597.1, AL031659.9, AC008891.7, |
| | | | | | AC016543.6, AL109628.5, AC009509.7, AB038653.1, AJ400877.1, AF317635.1, AL160165.17, |
| | | | | | AC004106.1, AC004893.1, AL049776.3, AL121753.30, AC002553.1, AL132777.4, AC010530.7, |
| | | | | | AC005911.6, AL050349.27, AL158830.17, AP002815.3, AP001727.1, Z79996.2, AL035455.30, |
| | | | | | AL033529.25, AC087071.2, AC009501.3, AC007570.23, AL137229.4, AC004084.1, AC005746.1, |
| | | | | | AF314058.1, AP001717.1, AL365364.19, AC010463.6, AC004906.3, AC008044.4, AC022415.5, |
| | | | | | AC008848.7, AB001523.1, AC005387.1, AC007565.1, AC020904.6, AC091529.1, AC002316.1, |
| | | | | | AF283320.1, AL133163.2, AC026172.3, AL356113.8, AC005079.6, AL163210.2, AP001725.1, |
| | | | | | AF348209.1, AC002369.1, AC008784.6, AL161937.13, AC011481.4, AL354735.14, AC008622.5, |
| | | | | | AF111167.2, AC011890.4, AC006449.19, AL352978.6, L78833.1, AL096761.1, AC004593.1, |
| | | | | | AL096701.14, AL136300.22, AL121949.13, AL031432.1, AP001561.4, AC013355.7, AC090958.1, |
| | | | | | AL133153.3, AC005837.1, L47234.1, AC004448.2, AP000500.1, AC005840.2, Z95114.19, AJ011930.1, |
| | | | | | AL359091.10, AL163300.2, AC003101.1, AL139415.10, AC011485.6, AC007738.2, AC005225.2, |
| | | | | | AC002477.1, AC012306.11, AL035413.19, AC006146.2, AL109798.19, AL512347.14, AL109925.11, |
| | | | | | AC008762.6, AL355543.13, AC022468.5, AL162252.17, AP001753.1, AL121905.23, AC005283.2, |
| | | | | | Z98742.5, AL137145.13, AC006126.1, AL136039.4, AC003070.1, Z82244.1, AP000088.1, AC005792.1, |
| | | | | | AC025540.7, AC010583.5, AC090949.1, AL158196.24, AC011495.6, AL354932.26, AC024028.10, |
| | | | | | AL031846.2, AC087590.1, AC026776.4, AC005726.1, AL159156.15, AC006064.9, AL136296.3, |
| | | | | | AC011472.7, AF196779.1, AC018663.3, AC009269.6, AL138720.19, AC007685.2, AC011479.6, |
| | | | | | AL139082.18, AL132712.4, AL079341.19, AC006274.1, AL136526.27, AL117692.5, AC006028.3, |
| | | | | | AL139041.17, AC004019.20, AC020550.4, AC009623.6, AC005529.7, AC003681.1, AC004882.2, |
| | | | | | AC004840.3, AC022150.5, AC018673.4, AL161799.19, AL359704.9, AL138680.15, AC011450.4, |
| | | | | | AC005578.1, AL136303.15, AL133465.30, Y14768.1, AF165926.2, AC011461.4, AC000052.16, |
| | | | | | AC025165.27, AC002310.1, AP000343.1, AF129756.1, AC007021.3, AL133245.2, AC005089.2, |
| | | | | | AC007597.3, AL022163.1, AF168787.1, AC074295.7, AP000252.1, AP000505.1, AL031587.3, |
| | | | | | AF243527.1, AL138836.15, AL353807.18, AL139232.13, AP000065.1, AC016894.7, AC018636.4, |
| | | | | | AC083884.6, AL139317.5, AL021546.1, AL136179.15, Z99716.4, AL049643.12, AL022336.1, |
| | | | | | AC008372.6, AP001169.1, AC018696.4, AC007263.4, AP001747.1, AC007679.4, AC006455.2, |
| | | | | | AL133448.4, AC009412.6, AC004491.1, AC073897.6, AC007055.3, AC004655.1, AP000215.1, AC004998.2, |
| | | | | | AC002350.1, AC012309.7. |
| HDHEB60 | 39 | 499233 | 1-1407 | 15-1421 | AL524364, AL527936, BE729676, BE734215, BG034535, BE879791, BG030700, BE782405, BG031399, |
| | | | | | BF219970, AW961043, AW245732, BE540977, BF125197, BE264862, BE264047, AA523441, BF348672, |
| | | | | | BF125434, AW250195, AW860381, AW246993, AI654715, AW168308, AI949310, AW068175, |
| | | | | | BE259690, AI393119, AW938768, BE279977, AW938746, BE857719, AW190234, AI871661, |
| | | | | | AA494392, AW900867, AA338903, BG006350, AL527587, BF091980, AA602247, BF804618, |
| | | | | | AW364083, AA357684, AW178944, R40832, BF374357, AW662637, AL524365, R42008, C20713, |
| | | | | | BF360339, BF915537, AW088134, BG035330, AI800433, AI559667, AI800453, AI536557, BE907440, |
| | | | | | AI689463, AI922091, AW151132, BF529043, AI285417, AI804505, AI952433, BF914091, AW118557, |
| | | | | | AI926593, AW151136, AI498579, AI539771, BE897632, AI432644, BG254284, BF304748, AI537677, |
| | | | | | AI494201, BF812963, AI500659, BG180468, BE883591, AI868831, AI866465, AI815232, AI866691, |
| | | | | | AI801325, BF812438, AI500523, AI538850, AW089221, BE968552, BE885490, AI887775, AI582932, |
| | | | | | AI590043, AI284517, AI923989, AI872423, AW172981, AI500706, AI445237, AI491776, AI289791, |
| | | | | | AW151138, BF811804, AI521560, AI889189, AI500662, AI582912, AW172723, AI284509, AI539800, |
| | | | | | AI889168, AI440263, AI538885, AI927233, AI866573, AI633493, AI434256, AI866469, AI434242, |
| | | | | | AI805769, AI888661, AI284513, AI500714, AI888118, AI277008, AI285439, AI436429, AI859991, |
| | | | | | BE964045, AI355779, AI623736, AI889147, AI371228, AI581033, AI431307, AI440252, AI491710, |
| | | | | | AI440238, AL047422, AI866786, AI567971, AI610557, AI860003, AI431316, AI242736, AI539260, |
| | | | | | AI828574, AI887499, AW151979, AL038575, AI539781, AI702065, AI539707, AI885949, AI285419, |
| | | | | | AW089557, AI559957, AI521571, AI469775, AI866581, AL047398, AW074057, AI815150, AI567953, |
| | | | | | AI446495, BE906230, AI867068, AI225248, AI698352, AI815239, AI371229, AI921420, AI624279, |
| | | | | | BF913616, BG252929, AI701890, AI687614, AA464646, BF038804, AI919345, AW858243, AI282249, |
| | | | | | AI962040, AI829330, AW078839, BE895765, AI554821, AI561170, BE764656, AI636811, AL515375, |
| | | | | | AI500146, AL042365, AW059765, AI263331, AI610756, AI440260, AI690946, BF814072, AI890907, |
| | | | | | BF811802, AW129310, AI866458, AI431238, BF815930, AI648567, BF925348, AL514069, BE540578, |
| | | | | | AA830821, AI924051, AI433157, BE964497, AI273179, BE621206, BG108452, AI371251, AI866510, |
| | | | | | AI499986, BE968711, AW151974, AW073697, AI866461, AI923046, BF339011, AI049859, BF752892, |
| | | | | | AI436458, BF526393, AI379711, AI918408, AI334445, AW169643, AL048403, AI915201, AA878808, |
| | | | | | BF764538, AI349814, AI953880, AI702902, AI800171, BE881675, AI819663, AI432656, AF118240.1, |
| | | | | | AB016531.1, BC000467.1, BC004356.1, BC000632.1, AK025906.1, BC004937.1, AK027081.1, |
| | | | | | BC007634.1, AL133070.1, X79204.1, AK000247.1, BC004908.1, AL080162.1, AL136781.1, AF017790.1, |
| | | | | | Z22828.1, U92992.1, BC002356.1, BC008382.1, BC001093.1, AL080127.1, AL136748.1, BC008195.1, |
| | | | | | AB048910.1, BC000713.1, AK024550.1, BC008818.1, BC001470.1, AK027116.1, AL133084.1, |
| | | | | | BC008488.1, AB063077.1, AL137275.1, AF056191.1, AK026086.1, BC004370.1, AB047609.1, |
| | | | | | BC003105.1, BC006164.1, BC002485.1, AL122098.1, AF111847.1, BC008893.1, M92439.1, AP001343.1, |
| | | | | | AL512454.6, BC002839.1, AK026038.1, AJ004832.1, X72889.1, BC002491.1, AK026865.1, AK026021.1, |
| | | | | | AK025084.1, AK025958.1, BC002607.1, AL136825.1, AL133049.1, BC001790.1, BC000785.1, |
| | | | | | AB060905.1, AL161953.1, AL136765.1, S77771.1, BC004926.1, AL137429.1, BC006207.1, AL389978.1, |
| | | | | | BC006508.1, AF067420.1, AK026642.1, AK026590.1, BC007657.1, AF260566.1, AB063087.1, |
| | | | | | BC002844.1, AF369701.1, BC004181.1, AL117432.1, BC000051.1, BC000386.1, BC007852.1, |
| | | | | | AK026749.1, AF151109.1, BC005805.1, AK026164.1, AB049629.1, AK025092.1, BC008717.1, |
| | | | | | AK026627.1, AL161802.15, AL353745.7, BC008365.1, D83989.1, U80742.1, AK026648.1, BC007207.1 |
| | | | | | BC002495.1, BC009272.1, AL136763.1, AL137556.1, AL136540.1, BC002777.1, AL080154.1, |
| | | | | | AK026532.1, BC009284.1, AC004690.1, AK026389.1, AF353396.1, AF022813.1, BC001328.1, |
| | | | | | BC002816.1, AL049423.1, AL049314.1, AB060837.1, AL512705.1, BC002524.1, AL137536.1, |
| | | | | | AK025541.1, AF036268.1, AL080126.1, AL389935.1, AK026631.1, AC044797.5, AK024622.1, |
| | | | | | BC009212.1, BC005007.1, S61953.1, AB019565.1, Y10080.1, AK025391.1, AK000432.1, AK026522.1, |
| | | | | | BC004265.1, AK026541.1, AK027161.1, AB047941.1, AL157464.1, AK026793.1, AB060929.1, |
| | | | | | BC008785.1, AK025431.1, AK026603.1, AB060839.1, AK027142.1, AL137656.1, AL133565.1, |
| | | | | | AL137665.1, AJ406932.1, AC003032.1, AC005057.2, AC010137.3, AL353802.14, AC005968.1, |
| | | | | | AL157360.8, AL162713.19, AL359997.8, AC007298.17, AL133629.1, BC006332.1, BC003687.1, |
| | | | | | AF030165.1, AL122100.1, AL133053.1, BC002476.1, BC000066.1, BC003122.1, BC006133.1, Y00093.1, |
| | | | | | AF002985.1, AB055805.1, AL122049.1, BC009395.1, BC002519.1, D44497.1, BC000377.1, BC001963.1, |
| | | | | | BC001191.1, AB060226.1, AL137557.1, AK000655.1, AF218023.1, AL162062.1, AK027188.1, |
| | | | | | AF188698.1, BC006412.1, AF218034.1, BC006465.1, S76508.1, AK027868.1, AC021020.3, AL080158.1, |
| | | | | | BC000317.1, BC005854.1, BC008025.1, U67211.1, AL050138.1, X99226.1, U77594.1, BC001082.1, |
| | | | | | AL110159.1, AF169154.1, AF271350.1, AL080060.1, AL136884.1, AK027114.1, BC002647.1, |
| | | | | | AB050418.1, AK025209.1, AB049758.1, BC004119.1, AL157431.1, AL137660.1, BC008078.1, |
| | | | | | AB056768.1, AL080129.1, AL110222.1, AL136882.1, AF205073.1, U51587.1, AL135933.11, |
| | | | | | AL157878.11, X66417.1, AL035458.35, BC006487.1, BC006147.1, BC003651.1, AF358829.1, |
| | | | | | BC007280.1, AK000445.1, AK026571.1, AL512746.1, BC002386.1, BC006198.1, S69510.1, AF112208.1, |
| | | | | | AF124728.1, AL162085.1, AF321617.1, AL137662.1, AL137480.1, Z94277.1, AC006222.1, AC010088.3, BC001427.1, |
| | | | | | AK026591.1, BC004960.1, AK000450.1. |
| HDPBA28 | 40 | 1062783 | 1-3433 | 15-3447 | T27258, AU140225, AI634860, AI767588, BE536545, AV689583, AI991689, AI635347, BE386012, |
| | | | | | BE767008, AW976840, AI640606, BE178142, BE177971, AW502888, AA977785, AI979247, |
| | | | | | AW503911, AA971157, AL135446, T27536, AA491080, W74279, R07065, AI687230, T27535, |
| | | | | | AW816221, AA436906, BE151455, BF510035, BF803181, BE151443, AA152394, AW505067, |
| | | | | | BG003144, AA761110, AA377229, AV648450, BE671931, AI873792, AA397568, AA399529, |
| | | | | | AA679080, AI382296, AV648107, AV648212, AV648537, AI913234, AI741350, R50230, AI920850, |
| | | | | | AI018184, AA702114, AI244588, R81654, AI126673, AA152500, BG057181, AA148355, BE817269, |
| | | | | | AF222340.1, AF183569.1, AF106037.1, AB011097.1, AC008906.5, AC009073.8. |
| HDPCL63 | 41 | 1019008 | 1-3023 | 15-3037 | AL040501, AL040502, BF312113, BF311401, BF312099, BF969955, BG118304, BE889750, BF528529, |
| | | | | | BE892499, BE378197, BE796737, BE312325, AL043139, BG033292, BE314857, BE312562, AW961051, |
| | | | | | BE875599, BE395864, BF528758, BF312036, BF982580, BF511000, BF206591, BF689722, BE278785, |
| | | | | | BE301032, BE538635, BF062495, AI074169, BF063302, BF528817, BE550763, AI439151, BF568696, |
| | | | | | AA143267, BE044341, AA534289, AI968616, BE644848, AI374815, AA025730, AI718363, AA984833, |
| | | | | | BE893882, AW084880, AW952114, BG012441, AA722825, AA514696, AI809529, BF835155, |
| | | | | | BF892650, AA932271, BF739765, BF894752, BG059761, AA134803, AI828209, AA460484, AI042088, |
| | | | | | AA134802, AI640382, R51678, AI925709, AI669079, AW469179, AI199232, BF900427, R53751, |
| | | | | | BF349740, BE279833, BE273231, AI640403, AI074545, BF753080, AW579547, BE731727, AI659329, |
| | | | | | AW002463, AA233548, AI003456, BG222370, AW137214, AA230095, T55730, H43116, AW962595, |
| | | | | | BF001788, AI670726, AA626289, BF910860, AV748998, AW276888, AA323567, AA233662, Z45129, |
| | | | | | H45702, BE245940, BE383639, R40971, R53750, AA037073, T03319, BF813413, BE074131, BF691850, |
| | | | | | BE244555, BE146067, BF924555, BF244566, AI141636, AA339051, H45753, BF691075, BF690883, |
| | | | | | H42344, AA291701, AI884572, AA356368, AW080418, AW071165, AW296941, AA631213, AA317597, |
| | | | | | R39383, AA324321, BE244793, BF221497, AI278324, BF977743, AA025729, BF055230, R10660, |
| | | | | | AA429477, AI468432, AA291748, AI537969, H52665, U46451, AI979165, BF570791, AA378387, |
| | | | | | AI918383, BF923133, AA455817, AW103386, BF868375, BF868370, AA922522, BF977581, R38308, |
| | | | | | Z39044, R51590, BF737690, BF976877, R12982, F04029, AI868824, T55772, AW263568, AA233779, |
| | | | | | R14452, T31372, AA292264, AA287135, AI560594, BF691578, AV743961, AA284706, BF894453, |
| | | | | | Z42923, AW152063, AI916442, BE694236, AA338803, BE049333, BE904088, T32117, BF933303, |
| | | | | | BE889979, BF914434, BF894452, BF764158, BE708005, BE892537, T92457, BF811804, BF994428, |
| | | | | | AI440263, BG167249, AI866465, AI828574, AI623736, AL513907, AW151136, AI539771, BE897632, |
| | | | | | AI537677, AI494201, AL513817, BF812963, AI500659, AI815232, AI801325, AI500523, AI538850, |
| | | | | | AI582932, AI923989, AI284517, AI872423, AI500706, AI445237, AI491776, AW151138, AI889189, |
| | | | | | AI521560, AI500662, AI866786, AW172723, AI284509, AI539800, AI538885, AI889168, AI866573, |
| | | | | | AI633493, AI434256, AI866469, AI805769, AI434242, AI888661, AI284513, AI500714, AI888118, |
| | | | | | AL096879.1, AL117649.1, AL021977.10, AL020993.1, BC004310.1, AL049426.1, AC004213.1, |
| | | | | | AL133070.1, AL136781.1, AL110196.1, AL136862.1, Z98744.1, AL136763.1, AL133049.1, AL110199.1, |
| | | | | | AL137523.1, AC069387.8, AL122049.1, AL049423.1, AL133080.1, AF132495.2, AL133084.1, |
| | | | | | AL133655.1, AL136765.1, AL050116.1, AL136825.1, AF090943.1, AF271350.1, AF002985.1, L40386.1, |
| | | | | | AL133607.1, AL080234.1, AL133015.1, BC002695.1, BC008904.1, AL133053.1, AK000645.1, |
| | | | | | BC008723.1, AB060917.1, AL136747.1, AB031069.1, AB063100.1, AL162062.1, AC007383.4, |
| | | | | | AL512733.1, BC008387.1, AL162272.10, S77771.1, AK027116.1, AB060842.1, AL050155.1, |
| | | | | | AK026480.1, AB046642.1, AL022723.4, AL133608.1, AL133072.1, AC008755.6, AL122110.1, |
| | | | | | AB048994.1, AK026086.1, AL122050.1, BC003591.1, AK025099.1, AB063077.1, AL133077.1, AF081195.1, AA443486. |
| HDPCO25 | 42 | 460682 | 1-753 | 15-767 | AI193249, AI809829. |
| HDPFP29 | 43 | 628254 | 1-1043 | 15-1057 | AW575379, AA769318, AI796662, BG029535, AW269780, AA809133, AA427866, AW953923, |
| | | | | | AI419264, AW088714, AI400326, BF945261, AI924874, AI150755, AI623762, AI239506, AI619494, |
| | | | | | AW148696, AI797909, BE327745, AI634907, AW070513, AI186243, AA768972, AA804195, AW674541, |
| | | | | | BE221186, AW204520, AA292638, AA235326, AW341643, AI005076, AW004816, AW603880, |
| | | | | | AW007235, AI871816, BE826643, BF222941, BE826639, BE826631, BE826634, AA292639, BE826687, |
| | | | | | AW514133, AA627727, AI690331, T05561, AW405407, AI673409, BF814220, AW075831, AI923685, |
| | | | | | AA931499, H56443, AW083896, BG165971, H56444, H16157, T82850, AW131313, AI249783, |
| | | | | | AA714383, AA548622, AI810663, BF091047, AA810885, R51826, F21597, AA702095, AI832872, |
| | | | | | AA832395, BF974513, T34785, AA524210, T16401, T90272, R28256, BE826642, AA262993, BF903485, |
| | | | | | AA568882, AW075840, AA535317, AI909659, R28033, BF814542, AW970732, AI810273, AI262373, |
| | | | | | BF000060, AI927452, AI679783, AI272283, BF901241, BE559850, AA742649, BF900830, AA922242, |
| | | | | | AI439758, AI445719, AI738794, AI625812, AI215105, AA749066, AI275641, BG054585, AA527826, |
| | | | | | BE143233, AA525108, AI950316, AL522808, BG111850, AA643261, AI432644, AI927233, BF771135, |
| | | | | | AA033725, AI699011, BE883591, AI431307, BG110517, BG113493, BG029667, AI433157, AI648567, |
| | | | | | AI690946, AI554821, BG252929, AW151136, AI539771, BE897632, AI537677, AI494201, BF812963, |
| | | | | | AI500659, AI866465, AI815232, AI801325, AI500523, AI538850, AI887775, AI582932, AI590043, |
| | | | | | AI872423, AI284517, AI923989, AI500706, AI445237, AI491776, AW151138, BF811804, AI932949, |
| | | | | | AI521560, AI889189, AI500662, AI539800, AI582912, AW172723, AI284509, AI538885, AI889168, |
| | | | | | AI440263, AI866573, AI633493, AI434256, AI866469, AI434242, AI805769, AI888661, AI500714, |
| | | | | | AI284513, AI888118, AI285439, AI859991, AI436429, AI355779, AI623736, AI889147, AI371228, |
| | | | | | AI581033, AI491710, AI440252, AI866786, AI610557, AI860003, AI242736, AI828574, AI887499, |
| | | | | | AW151979, AI539781, AI539707, AI702065, AI885949, AW089557, AI559957, AI285419, AI521571, |
| | | | | | AI469775, AI866581, AI815150, AI567953, AI446495, AW858243, BG164558, AA806719, BE885490, |
| | | | | | AI289791, BF811802, AL110306, AI929108, BG257535, BG027628, BF338002, AL045500, AI866820, |
| | | | | | AL042515, AI561170, BE886728, AI784028, AI890907, AL039390, BF795712, BE895765, BF815930, |
| | | | | | AI468872, BF802671, AW089006, BF812438, BG260144, AI371251, AL079960, AI866510, BE047852, |
| | | | | | AI274759, AI866461, AI923046, AI565172, AL047422, AI431316, AL048403, BG168086, AW827227, |
| | | | | | AA074168, AI433976, AI867068, BG113224, BF725463, BE537531, X79568.1, U28282.1, AK027136.1, |
| | | | | | AC007383.4, BC006408.1, AB060841.1, AL110280.1, AC026464.6, AL133049.1, AL137294.1, |
| | | | | | AC023880.5, BC006159.1, BC004431.1, BC008078.1, AC010149.8, AK025209.1, AK026793.1, |
| | | | | | AL080124.1, AL389935.1, AL137271.1, AC006994.4, AC021325.5, U72621.3, AC016652.5, AL359620.1, |
| | | | | | AL035458.35, AL133014.1, AF012536.1, BC008417.1, BC001844.1, AL137538.1, AC004987.2, |
| | | | | | U77594.1, AC008592.4, BC006136.1, AL136843.1, AC011450.4, AL353625.5, AF090900.1, AK026626.1, |
| | | | | | AC018643.3, BC007998.1, AL137705.1, AB060826.1, AL080234.1, AK026894.1, BC002355.1, |
| | | | | | AL390154.1, AL136766.1, AL137292.1, AC009087.4, BC008708.1, AL137530.1, BC008280.1, |
| | | | | | AK027160.1, AF095901.1, AL133344.28, AL353999.3, AC004822.1, BC009395.1, BC002473.1, |
| | | | | | AL136845.1, AB060888.1, AB060229.1, AK000432.1, AC004686.1, S77771.1, AL353802.14, |
| | | | | | BC006509.1, AF334404.1, BC009026.1, AL355834.4, AL353594.13, AP001873.3, AL356278.8, |
| | | | | | AK027217.1, AK025632.1, AK024546.1, AL133104.1, AC005902.7, AK000655.1, AK024747.1, |
| | | | | | BC000714.1, AK000647.1, AK025484.1, AF056191.1, AF348209.1, AK027161.1, AF120268.1, |
| | | | | | BC009355.1, AK000391.1, AC006313.1, AL122049.1, AF353396.1, AB063070.1, AK025015.1, |
| | | | | | AB047631.1, AF179633.1, BC004215.1, BC004908.1, AB056768.1, AK025465.1, AL137665.1, |
| | | | | | AB060842.1, AL391244.11, AK000450.1, AL512684.1, AB049900.1, AC009484.3, Z82022.1, |
| | | | | | AF218006.1, BC002343.1, BC006494.1, AK000250.1, AL136768.1, AK025708.1, AB047904.1, |
| | | | | | AL157360.8, AK025383.1, AL161628.9, AK026591.1, AK000718.1, AL163282.2, AK024992.1, |
| | | | | | AL136622.1, AL137557.1, AL389978.1, AF285836.1, BC002519.1, AC006112.2, AF225424.1, |
| | | | | | AB060856.1, BC007460.1, AB055352.1, AK000212.1, BC007571.1, AC010530.7, AB055303.1, |
| | | | | | AB047869.1, AL137711.1, AF090886.1, AB060887.1, AF274348.1, AF274347.1, U80742.1, AL133619.1, |
| | | | | | BC006412.1, AL353807.18, AL136784.1, AL137476.1, D55641.1, AK026542.1, AL080060.1, |
| | | | | | AK026057.1, AK027193.1, AL136781.1, AF002672.1, AL356747.18, AL133560.1, AK026408.1, |
| | | | | | AF094850.1, AL359941.1, AF003737.1, BC004945.1, AC004383.1, AL136850.1, AB047966.1, |
| | | | | | AC010972.3, AL359600.1, AB060837.1, BC006180.1, AF132730.1, AL137574.1, AL353745.7, |
| | | | | | AL162062.1, AF205861.1, AL121601.13, AL136892.1, AL050138.1, AL445236.22, S76508.1, |
| | | | | | BC004533.1, AF169154.1, AC024247.4, AC004883.2, BC009033.1, AL035407.15, AL138976.5, |
| | | | | | AE006462.1, AF151109.1, AL138770.3, AB055374.1, AL136844.1, AB056420.1, AF113222.1, |
| | | | | | AL512689.1, BC006411.1, AL137256.1, BC007198.1, AL122118.1, AJ012755.1, AL035587.5, |
| | | | | | BC007031.1, AF271350.1, AK027111.1, AF078844.1, AL132985.4, AK026533.1, AC006222.1, AL117463.1, AF245044.1, |
| | | | | | AC020659.5, AK024601.1, AF069506.1, AL022165.1, AB047878.1. |
| HDPGT01 | 44 | 771583 | 1-2673 | 15-2687 | AL524311, BG251269, BF310537, AU133126, BF683381, BF038290, AW732293, BF316433, |
| | | | | | AW170099, AI056333, BF349288, AA972732, AI675184, AW177595, BE141799, AW664330, |
| | | | | | BG056730, AW751928, BE141798, AU157403, AI803604, AW516199, AI421509, AI089433, AA622275, |
| | | | | | AU154510, AA699595, AW733094, BF838983, AI148225, AA921836, AA701632, AI361562, H75815, |
| | | | | | AV701643, AA931757, AA825979, BE837455, AI247022, AA035572, AI015040, AI032666, AW167576, |
| | | | | | T89750, BF349289, H06815, AI168573, AI702086, W42567, Z43621, AA505697, R92850, AI204070, |
| | | | | | AA724075, H06816, W72651, R93066, W76613, W42546, W86249, AW751931, AI272047, T16739, |
| | | | | | AI868745, AA860360, AI207229, AI249348, AI073394, AA035062, AA758712, AI204396, T11609, AA649046, |
| | | | | | AI168656, AA729782, AL110209.1, AL389957.1, AK001705.1, AB017494.1. |
| HDPHI51 | 45 | 460679 | 1-714 | 15-728 | AC005946.1, AC018755.3. |
| HDPJM30 | 46 | 879325 | 1-1621 | 15-1635 | AI420713, BF951818, R85260, H28149, BF899899, BF594396, AW292642, H44846, BF685411, |
| | | | | | AI739196, AI867313, BF063759, AI380559, BE504664, AW166357, BE735346, BF064117, AB001535.1, |
| | | | | | AP001754.1, AP001065.1, AP001064.1. |
| HDPMM88 | 47 | 972734 | 1-4879 | 15-4893 | AV715713, BF446914, BG057685, BF898163, AI083524, AI290271, AA318526, BF932901, R78174, |
| | | | | | C17785, R77809, BF898707, AW795715, AI638633, BF921994, BF904690, AW016805, AC025040.7, |
| | | | | | AK025125.1, AC016045.8. |
| HDPOJ08 | 48 | 731863 | 1-1641 | 15-1655 | BF968799, BF791555, AL513581, BE879926, AI949941, BE827843, BF968555, AI765763, BE875907, |
| | | | | | AW959968, AW382167, BF692458, BE876162, BF106234, AV713629, AV699640, AW382174, |
| | | | | | AU136532, BF692025, AA449500, AW902068, AW583040, BF212019, AW382170, AI768711, |
| | | | | | AI918137, AW235520, AI199832, AI074542, AA243341, AA071031, AL513582, AI308913, BE150978, |
| | | | | | AW609396, AA604828, AA831297, AI304674, BE151243, AW391610, AA704776, BE150919, |
| | | | | | AU155999, AW389522, AA878385, BF979062, BE150848, BE150932, AA554171, AI086256, AI285140, |
| | | | | | W48831, AW379916, BF215357, AW389518, AI361484, AI290204, BE150880, AA679730, AA285176, |
| | | | | | AI367820, BF570762, AA287652, AI028778, AI342266, AI332795, BE501465, AW609661, AA564884, |
| | | | | | AA497006, BF432681, BF438907, AA496929, AI742352, BF572848, AA824372, AW582335, AA286805, |
| | | | | | AA809400, AA101705, BE150881, H50009, AI356809, AI863722, AA449072, AW394227, N64570, |
| | | | | | BE614989, H66597, BE465872, AU157281, BF792958, AW394207, BE702178, AI860155, BE702109, |
| | | | | | T96603, BF792810, AW802638, H47883, BE702071, AW391634, AA425753, BE149864, BF766698, |
| | | | | | BF766705, T96711, R59882, AW816178, AI301234, AA524763, AW582392, AW609367, AA427806, |
| | | | | | AA243537, H89251, AA297709, BE892299, AI703471, AA284029, W49812, AI458780, AW075621, |
| | | | | | H89250, AI867621, AW380564, BF912063, H66596, AW380556, AW814225, AW380562, AA730264, |
| | | | | | R59881, AI433332, AA210752, AA863154, BF513435, H47884, AA211712, C00853, AU137710, |
| | | | | | AI269992, AW337692, AA489590, AA070527, AA101704, AW391666, AA296965, AA296966, |
| | | | | | AA497092, AI570809, BE673630, T25724, AW582435, BE150974, AW391617, AI954461, BF999751, |
| | | | | | AW152174, BE876251, AI587112, BF764712, AW816180, AW102931, AK024215.1, AK023478.1, AB014732.1. |
| HDPPN86 | 49 | 1037893 | 1-6283 | 15-6297 | BE250002, BE394338, AW935469, AW749660, BG250570, BF982358, AI821271, BE541597, AI313180, |
| | | | | | BE293706, BE872198, W22478, AW976010, AI002815, AW963152, AU117456, AV762145, AV760760, |
| | | | | | BF792326, AW965008, AV764490, AW837083, AV700498, BG032943, AW600804, AV733710, |
| | | | | | AV759172, AA680243, AU123691, BE908796, AL037632, BE796439, AI076616, AW406162, AI732120, |
| | | | | | BF339640, AV700988, AA484962, AV699709, AW965642, AF074667, BE902459, AV760599, |
| | | | | | BG164166, BE273856, AI313166, AU118745, BE387734, AW961994, AA381195, AI364780, AU159301, |
| | | | | | AV761286, AA722372, AU158602, BE154495, AL044000, BG250302, AL041706, AL040921, |
| | | | | | AV700545, AU145083, AI817516, AV729960, AV760258, AW820787, BE071876, BF965477, BE071877, |
| | | | | | AW974126, AV759362, AI565581, AI284640, AI963600, AI608771, AL048626, AW440545, BF677892, |
| | | | | | AI204304, BE902975, AW317075, AA836811, AW088224, BF337291, AA634072, AI350211, AV704375, |
| | | | | | AV760777, AW193265, BF668217, AI133164, AV762395, BF736198, AW953071, AU157011, |
| | | | | | AW833862, BF241967, AL046409, AW995093, AV711987, AA491814, N94311, AI431303, AI963720, |
| | | | | | AW276817, BF828714, AI613280, AV762098, AA601355, BG249643, BF697673, AF330238, AV760937, |
| | | | | | AV728425, AW080939, AA599480, AV740801, BE156019, AI924251, AA469451, F36273, AV658688, |
| | | | | | BF055844, AI289067, AL119691, AV763354, AI061334, AV763971, BG058664, BF680074, AV725423, |
| | | | | | AL045053, AW970915, AW975425, AI471481, AI305766, AL138265, BE350475, AI679294, AA205915, |
| | | | | | AI754955, AL137737.1, BC001041.1, AK000310.1, AC010366.5, AC005280.3, AL137852.15, |
| | | | | | AC022148.5, AC004263.1, AP001666.1, AP001630.1, AE006463.1, AL354932.26, AC005484.2, |
| | | | | | AL590762.1, AF088219.1, AC007782.20, AC004134.1, AC005288.1, AC011811.42, AC005911.6, |
| | | | | | AL161656.20, AC072052.6, AC009470.4, U47924.1, AC004859.2, AL035587.5, AL162505.20, |
| | | | | | AC073138.3, AC025166.7, AL359552.16, AC007954.7, AC034242.5, AL139317.5, AC011455.6, |
| | | | | | AL022724.2, AL109965.34, AC068533.7, AL161779.32, AP000359.1, AC010271.6, AL109825.23, |
| | | | | | AL122013.5, AL163282.2, AC020893.5, AC005324.1, AC005257.1, AC003009.1, AC010148.13, |
| | | | | | AC005011.2, AL109935.39, AL049759.10, AP000901.5, AL354928.9, AC009144.5, AL163853.4, |
| | | | | | AL109805.14, AC009086.5, AC009996.7, AE000658.1, AC016898.6, AL590076.3, AC008543.7, |
| | | | | | AC005670.1, AL591770.1, AC007204.1, AC006251.3, AC009122.8, AL034550.31, AL136418.4, |
| | | | | | AL139054.1, AC006345.4, AC004821.3, AC011497.6, AC003006.1, AC004678.1, AL117351.12, |
| | | | | | AC000118.1, AL512430.14, AC008622.5, Z93023.1, AC008379.6, AC006435.7, AC006211.1, |
| | | | | | AF196779.1, AL357515.26, AL049776.3, AL133448.4, AC004675.1, AL137818.3, AL354720.14, |
| | | | | | AC079753.7, AP001619.1, AC044797.5, AC011236.8, AC020906.6, AC010422.7, AL050328.24, |
| | | | | | AL109921.21, AC005771.1, AC005234.1, AL136223.11, AL121928.13, AC000075.2, AL163279.2, |
| | | | | | AL050349.27, AC020558.4, AC005488.2, AC004997.2, AL450339.5, AC004876.2, AC005844.7, |
| | | | | | AL023575.1, AL121658.2, AC007683.5, AP000553.1, AC008745.6, AC009131.6, AC004596.1, |
| | | | | | AC004826.3, AL160163.24, AL031597.7, AB023049.1, AC016769.10, AC006064.9, AC005664.2, |
| | | | | | AB053170.1, AF001549.1, AL590964.8, AP001726.1, AC025593.5, AC018808.4, AC007052.4, |
| | | | | | AC007011.1, U95742.1, AL035422.12, AP001689.1, AL133477.16, AC004686.1, AL136304.10, |
| | | | | | AL050335.32, AL158830.17, AF196971.1, AL132642.4, AC004638.1, AL135927.14, AC007227.3, |
| | | | | | AL136300.22, AC005585.1, AL158159.14, AL118520.26, AL355094.3, AL445201.14, AC003007.1, |
| | | | | | AC002314.1, AC018828.3, AL139327.18, AC005632.2, AC007957.36, AC011472.7, AL445248.7, |
| | | | | | AP000302.1, AL078477.5, AL589947.3, AL022328.21, AC024561.4, AC003070.1, AC007298.17, |
| | | | | | U82671.3, AC008895.7, AC018751.30, AC012476.8, AF215937.1, AC003085.1, AC087071.2, |
| | | | | | AC005696.1, AP001216.3, AC009958.2, AC005839.1, AD000092.1, AC005682.2, AP000513.1, |
| | | | | | AL136126.34, AC011816.17, Z98200.8, AC005668.1, AL096791.12, AL162426.20, AL163249.2, |
| | | | | | AC023114.5, AC002470.17, AC005755.1, Z99129.1, AL035683.9, AC006128.1, AL354808.24, |
| | | | | | AC008039.1, AC004019.20, AC008079.23, AC005330.2, AL031255.1, U78027.1, AC010740.7, |
| | | | | | AE006467.1, AC003111.1, AL359513.12, AC004975.2, AC005377.2, AL121929.17, AC023669.8, |
| | | | | | AC007318.4, AC005520.2, AL136980.5, AC026464.6, AL121989.12, AC005081.3, AP000474.2, |
| | | | | | AL158210.12, AC011452.6, AC006487.8, AL034420.16, AL133367.4, AP001745.1, AP000555.1, |
| | | | | | AC016939.8, AC008687.4, AC007666.12, AC006468.9, AC006480.3, AL096841.6, AC005399.19, |
| | | | | | AC006132.1, AL034380.26, AC006312.8, AC017079.5, AL157372.18, AC021752.5, AF217796.1, |
| | | | | | AL035450.1, AP001688.1, AF279660.2, AC006130.1, AL133500.3, U91326.1, AL161756.6, AL021939.1, AL035458.35, |
| | | | | | AC005052.2, AC020915.6, AL445189.7, AC024166.3. |
| HDPSB18 | 50 | 1043263 | 1-3394 | 15-3408 | AA631915, AA595661, AI348780, AA489390, AA640305, BG231195, AW239465, AI523205, |
| | | | | | AA180056, AW975434, AI819419, AV759517, AA199578, BE677227, BF740656, AW839858, AI754064, |
| | | | | | BF880881, AI270280, AI567676, AA568303, AV706458, BE062357, AI753131, AW247955, AI610814, |
| | | | | | AA493546, AI086603, AV717475, BF875339, AL355512.22, AF207550.1, AF038458.1, AL109797.18, |
| | | | | | AL118520.26, AL590762.1, AC003101.1, AC004000.1, Z93023.1, AL121712.27, AL034549.19, |
| | | | | | AC072052.6, AL11692.5, AC020931.5, AP002852.3, AB023048.1, Z93928.1, AC005081.3, AF196779.1, |
| | | | | | AL133448.4, AP000116.1, AL121886.22, AP001726.1, AC011461.4, AC005015.2, AC006013.3, |
| | | | | | AC011475.6, AP003352.2, AL121992.24, AC011491.5, AC020663.1, AC008569.6, AC022087.8, |
| | | | | | AC011495.6, AC010271.6, AC007546.5, AC004812.1, AL139100.9, AC008745.6, AC079316.15, |
| | | | | | AC003043.1, AC003962.1, AL035072.16, AC010605.4, AC004522.1, AC007151.2, AL158830.17, |
| | | | | | AP001694.1, AC009220.10, AC009144.5, AL121574.19, Z98941.1, AL162426.20, AL356299.16, |
| | | | | | AL122035.6, AL009181.1, AL049569.13, AC074121.16, AL138976.5, AL034372.33, L78833.1, |
| | | | | | AL117336.22, AP001710.1, AC005913.2, AC006948.4, AC011446.6, AC016894.7, AP001725.1, |
| | | | | | AC002300.1, AF111167.2, AC005522.2, AC005488.2, AL137229.4, AC008891.7, AC008481.7, |
| | | | | | AC002470.17, AC011442.5, AC025165.27, AC005004.3, AC005067.2, AL391827.18, AC005377.2, |
| | | | | | AC005412.6, AP000501.1, Z93244.1, AL158040.13, AL445483.13, AC004967.3, AC006014.2, |
| | | | | | AL117258.4, AC008440.8, AC011811.42, AL139809.16, AC011497.6, Z97054.1, AL133367.4, |
| | | | | | AL022316.2, AC018809.4, AL132780.5, AP000692.1, AP000555.1, AC004150.8, AC010553.6, Z99716.4, |
| | | | | | AC005839.1, AP000892.4, AC009412.6, AP000744.4, AC005180.2, AL135978.4, AP000065.1, |
| | | | | | AC005098.2, AC004963.2, AC021016.4, AC024561.4, AL139396.17, AG018636.4, AC010543.8, |
| | | | | | Z93015.9, AL139415.10, AL138756.23, AC024952.4, AC010319.7, AC008806.4, AC010422.7, |
| | | | | | AL365444.11, AC008812.7, U80017.1, AL121891.22, AC000360.35, AL109743.4, AL096791.12, |
| | | | | | AL035086.12, AL132712.4, AC010463.6, AP000048.1, AL122001.32, AC004771.1, AC004019.20, |
| | | | | | AL135927.14, AC007227.3, AC027126.4, AC022384.4, AL024498.12, AC011465.4, AC004890.2, |
| | | | | | AL132768.15, AL049538.9, AC018751.30, AC007957.36, AC004821.3, AC010458.5, AL109825.23, |
| | | | | | AC040160.4, AC004125.1, AL109923.29, AC004526.1, AL161937.13, AC006330.5, AL033519.42, |
| | | | | | AC010598.6, AC008264.10, AC009137.6, AJ003147.1, AL008582.11, AL121601.13, AP001610.1, |
| | | | | | AL022721.1, AF217796.1, AL049795.20, AB000565.1, AC006449.19, AC019205.4, AL034420.16, |
| | | | | | AC007277.2, AL020997.1, AC009060.7, AC004887.2, AC008372.6, AL449305.4, AC007536.9, |
| | | | | | AC006057.5, AC005726.1, AL035460.15, AC011740.7, AC009756.9, AL161747.5, AC005581.1, |
| | | | | | AC004166.12, AL161670.4, AC083867.4, AL354932.26, AC003982.1, AC005527.3, AC011248.8, AC007216.2, AC020983.7, |
| | | | | | AC004878.2, AC005399.19, AC004638.1, AL359541.11, AC020913.6. |
| HDPSH53 | 51 | 1309174 | 1-1649 | 15-1663 | AU159990, AI307612, AW079047, AI334650, AW874319, AW139828, AI364431, BE242397, BF726322, |
| | | | | | BF724691, AI568870, AW268253, AI868831, AI433976, BF795712, BG058208, BF883916, AL119049, |
| | | | | | AL135661, AL513911, AW303152, AI567632, AL121270, BE047863, BF343172, AI673256, AI679724, |
| | | | | | BE048071, AL036146, BE785905, AI500553, AI349645, BG168696, AV682521, B0250190, BE964812, |
| | | | | | AI567351, AI349772, BF971016, BE964700, AW827203, AW235035, BG036846, AI863014, BF812933, |
| | | | | | AW162071, AI608667, AI436456, AL047042, AI064830, AI349933, AL046849, AI687376, AL515041, |
| | | | | | AI815383, AL513597, BE905408, AL513553, AL513907, AL514919, AL514803, AW071349, AI500077, |
| | | | | | AI702406, AL047763, AW999049, BG179993, AL036396, BG107847, AI690751, AL045500, AI433157, |
| | | | | | BG252929, BE877769, BE048179, AL119791, BE965556, AV755290, BF054789, AI687728, BF673434, |
| | | | | | AV682809, BF344652, AV704928, AI538716, AL513741, AV681872, AV682289, AV682266, BF981774, |
| | | | | | AV727776, BE966388, AV682249, AW089572, AI873731, BE048081, AL036759, BG033403, BG151247, |
| | | | | | AL514627, AV710608, BG178809, AV655645, AV682672, BF793644, AI440426, AL120736, |
| | | | | | AW117882, AL121365, AI969567, AI281779, BG259801, AV733819, AW827211, AL515173, AI349256, |
| | | | | | AL036802, BE018711, AV762488, BG108324, BF968493, BG260037, AV755581, AI687362, AL119748, |
| | | | | | AI312152, BG257535, AV756067, AI889203, AI349937, BG029399, BG180996, AI686926, AL513693, |
| | | | | | BE887488, BF817392, AL513803, AW103371, BF036115, AV758668, AV732941, AV711509, BF342709, |
| | | | | | BF726297, AW195957, AV681647, BF968041, BG108147, BF726001, BE967113, AI521012, AW238730, |
| | | | | | AI349004, AV757797, AL513837, AV682466, AI366549, AV726951, BE777769, AV723953, BG112879, |
| | | | | | AV681759, AW074993, AA640779, AI343112, AL036980, AA613907, BG109270, AI340582, BE781369, |
| | | | | | BG179633, BE048135, BE048163, BF037097, BG121222, AV758822, BG027204, AV758592, AV682479, |
| | | | | | BE968552, AV757455, BE880190, AI690835, BE963035, AI920968, AI818683, AI499393, BE047859, |
| | | | | | AV682267, AL120854, AV682082, AV758179, AV757012, AI934036, AL513753, AI282655, AI439087, |
| | | | | | AV758217, AV756477, AV682441, BE048026, AV681951, AV763915, AI678302, AI609592, BE048319, |
| | | | | | AV764059, AV706777, AV710479, AW301409, BF726421, AL529946, AI699857, AV682772, AI469532, |
| | | | | | AI207510, BE969709, AW467961, AV682792, AV717179, AV758806, AI969601, AV709517, AI349614, |
| | | | | | AL514791, AI866608, AV755311, BF340031, AV682330, AI580190, AV681857, AV711924, BE881155, |
| | | | | | AW166645, AI349598, AI906328, BG109125, BG114104, AV681668, BE613622, AV708119, |
| | | | | | AW274192, AV682333, BE964486, BG031815, AW080838, AV755613, AV660662, BE909549, |
| | | | | | AI597918, AF311287.1, AK024001.1, BC008877.1, BC008417.1, AL136586.1, AF078844.1, AL050393.1, |
| | | | | | AL389978.1, AF090934.1, AF125949.1, AL157431.1, BC008387.1, AL050146.1, AL442082.1, |
| | | | | | BC007021.1, AL390167.1, AL442072.1, AL133640.1, AL080060.1, AB056420.1, AL133016.1, |
| | | | | | BC008365.1, AB055303.1, AF090901.1, AJ242859.1, S78214.1, AF090943.1, AL117460.1, AL136787.1, |
| | | | | | AL512733.1, AF090900.1, AF090903.1, AK026608.1, AF104032.1, AB048953.1, AF218014.1, |
| | | | | | AB049758.1, AL137527.1, AL110196.1, AL117457.1, AL133606.1, AL049452.1, AL049938.1, |
| | | | | | AK000212.1, AL110221.1, BC008488.1, BC003687.1, AL359596.1, AL359601.1, AK026865.1, |
| | | | | | AF111847.1, BC003683.1, AB060916.1, AB048964.1, AB063046.1, AB047615.1, AB056809.1, |
| | | | | | AL136892.1, AL136789.1, AL050149.1, AF090896.1, AF219137.1, AB056768.1, AB063008.1, |
| | | | | | AB063070.1, AK026741.1, AL050116.1, AL050108.1, AL136749.1, AB047801.1, AL122050.1, |
| | | | | | AK025339.1, AL162083.1, U42766.1, AB050510.1, AB060887.1, AB019565.1, AK026045.1, |
| | | | | | AF106862.1, AL080124.1, AL133075.1, AL162006.1, AK025084.1, AL049466.1, AK027868.1, |
| | | | | | AB055361.1, AB060908.1, AL136799.1, AL049314.1, AL080137.1, AL137283.1, AK025958.1, |
| | | | | | AL122093.1, BC001967.1, AL096744.1, BC006807.1, Y16645.1, AL133557.1, AL050277.1, AK026855.1, |
| | | | | | AL049430.1, AL133093.1, AF091084.1, AL389982.1, AK026744.1, AL136844.1, AL136768.1, |
| | | | | | AK025772.1, AL122121.1, AL133565.1, AL133080.1, AK026533.1, BC002733.1, AL137557.1, |
| | | | | | AB060863.1, AL137459.1, AK000618.1, AL512746.1, AL122123.1, AF097996.1, AF207829.1, U91329.1, |
| | | | | | AF271350.1, AL512719.1, AL512754.1, AK027096.1, AB055368.1, AB060912.1, AK026784.1, |
| | | | | | X82434.1, AF146568.1, AB062938.1, AL512718.1, AL117394.1, AL050138.1, AF125948.1, AB060825.1, |
| | | | | | AK026452.1, AK000614.1, AL359941.1, AL359618.1, AK000137.1, BC004556.1, AL136928.1, |
| | | | | | AK026542.1, AL117583.1, AK000445.1, AK025092.1, BC006195.1, AB060826.1, AB051158.1, |
| | | | | | AL110225.1, AK000652.1, AB048954.1, AK000083.1, BC001045.1, AK026504.1, AP001873.3, |
| | | | | | AK026592.1, AK026480.1, AK026583.1, AK025491.1, AB055366.1, AL117585.1, AB048974.1, |
| | | | | | AL137550.1, AB052191.1, AL353940.1, AL049464.1, AK024538.1, AL133560.1, AF225424.1, |
| | | | | | AK026532.1, AB060852.1, AK026647.1, AF177336.1, AK026927.1, AB055315.1, AK026353.1, |
| | | | | | AL359615.1, AL049382.1, S61953.1, AC006371.2, AK027113.1, AK026534.1, AL512689.1, AB047904.1, |
| | | | | | AK026528.1, AL049300.1, AB063093.1, AC002467.1, AL133258.16, AL513015.6, AL117435.1, |
| | | | | | AL050024.1, AL136845.1, BC007199.1, BC008070.1, AF348209.1, AL353594.13, AK027204.1, |
| | | | | | AK026959.1, AK026086.1, AF061943.1, AL512761.1, AK026947.1, AL137463.1, AF091512.1, |
| | | | | | AC007390.3, BC002839.1, AK025414.1, AC007375.6, AK025391.1, AK025967.1, BC008485.1, |
| | | | | | AK027164.1, AL122098.1, AC004690.1, BC004951.1, AB052200.1, AK000323.1, AB049892.1, |
| | | | | | AL353802.14, AK026642.1, AL157482.1, BC008983.1, AK000432.1, AC022215.4, AK000647.1, |
| | | | | | AF183393.1, AK026651.1, BC008280.1, Z82022.1, BC008899.1, AK024524.1, AC006435.7, AL080127.1, |
| | | | | | AL133113.1, BC008382.1, AB060883.1, AC026787.4, AL049283.1, AF260566.1, AC009364.8, AB063084.1, AB056421.1, |
| | | | | | AL136786.1, AK025524.1. |
| HDPSP01 | 52 | 1352280 | 1-2329 | 15-2343 | BE876951, BF791762, BF112057, BG179551, AV752013, AI091429, BF00176, AV752703, BE391989, |
| | | | | | AI871101, AI458302, AW292744, BF196320, BE391322, BE390919, BF058297, BF435913, AI560217, |
| | | | | | AI808718, AI658996, BG056475, AI199318, AI381895, AI814608, AW190726, AA047000, AI479404, |
| | | | | | AI660983, BE388064, AA419038, AA035467, AW517227, AI361637, AI863893, AI198435, AI078128, |
| | | | | | AI093316, AJ403129, AA442664, AA725194, AI831358, BE206128, AI274339, AW297826, AW104389, |
| | | | | | AI948638, AI261248, AI869935, AA915909, AI283200, AI871060, AI269385, AI769275, AI200508, |
| | | | | | AI566171, AI275083, AI857306, AA910327, AA046943, AI291474, AI291805, AI983969, AW070742, |
| | | | | | AA423792, AW339900, AI308118, AI869944, AA012994, AI677732, AI913920, AA661657, AA427407, |
| | | | | | AI197804, AI141350, AA725186, AA954707, BF111675, AI864014, AI051823, AA864187, W24931, |
| | | | | | N41835, AA031475, N92812, BF734297, BF733728, AA035466, BF000025, AI026152, AA514348, |
| | | | | | R70380, AA961077, AA031617, AI673156, AA250784, AA378564, AW051192, AW452102, AA411122, |
| | | | | | AA886656, AW293787, AA012993, H91665, AA927216, AW149476, H91759, T86488, BC006411.1, AC022007.3, |
| | | | | | AC018809.4, X87479.1, Z22384.1, Z22374.1. |
| HDPSP54 | 53 | 744440 | 1-3077 | 15-3091 | BG256849, BG261011, BG178729, BG110345, AI923220, BE466885, BF667257, AW271504, |
| | | | | | AW243442, BE466659, BG171469, AV661528, AW271637, AW516811, N36059, AI804888, BE882420, |
| | | | | | AI650826, BF815232, AW964507, AI921747, BE936373, BF984751, BG259707, AI392784, AW076096, |
| | | | | | AI807747, AW103424, AA604757, AA633209, AW778887, AW418987, AW242326, BE622192, |
| | | | | | BF666519, BF978796, AW014203, AI925261, BF853590, AW131363, AW514756, N33223, AI819108, |
| | | | | | AI126250, AV649748, AI953896, AV714556, AI524472, BF697124, BE218100, AW629098, N21567, |
| | | | | | AI694687, AI700209, AA731730, AA577191, BE219931, N33824, BE567212, AW778908, AW087660, |
| | | | | | AI990562, BF792681, R52426, AI559108, AA743389, N35579, N25189, N30972, BF667662, AI339587, |
| | | | | | N24947, AI376459, AA742979, N27426, R23308, AI125720, AA954281, AI801129, AW087669, |
| | | | | | AI701246, AI245517, T26975, BF572334, BE177998, BE564497, AI636147, AI640713, N41938, H97662, |
| | | | | | AI243263, BE967025, AI572028, BE543895, H29641, BE762905, BF246305, Z46022, H29640, |
| | | | | | BG223352, AI270534, AI983198, H99399, BF965116, BF692452, Z42169, AI521060, BF102948, R82562, |
| | | | | | AV646807, N34709, AV646406, R23233, AA373475, BE005657, AA319637, T34245, BG104469, |
| | | | | | W20047, AW962829, BF572695, AI369988, AI741908, BE830524, H29549, D78710, Z41637, H29548, |
| | | | | | AA833897, AI367191, AA659275, AW899997, F01708, BF697465, AI246035, AI219239, BF154447, |
| | | | | | AI221561, AI273738, AI281168, BE005723, BE170424, AI685342, BE882847, AB007962.1. |
| HDPUW68 | 54 | 812737 | 1-1734 | 15-1748 | AW295848, AI132995, T48851, AI247571, AW469884, AV734061, T48852, BE378325, AW571432, |
| | | | | | AA344713, AW131386, AU138048, AW190967, BF896891, AA400508, AA400618, AA835515, |
| | | | | | AF170485.1, AJ007395.1, AJ130710.1, AF193441.1, AJ130711.1, AF227924.1, AB026265.1, |
| | | | | | AF247180.1, AF178981.1, AF223403.1, AF195092.1, AC020914.7, AF277806.1, AC011473.4, |
| | | | | | AF135027.1, AF310234.1, AF287892.1, AC008750.7, AJ130712.1, AJ130713.1, D86359.1, D86358.1, U71382.1. |
| HDPXY01 | 55 | 879048 | 1-752 | 15-766 | AW860154, AW860153, AW821875, BE869510, BF094022, BF337555, BF527692, AW845544, |
| | | | | | AW176604, BF734241, BF928740, BF360615, BE169703, AJ230819, BF734231, AL133649.1, AJ271791.1, AJ271790.1. |
| HDTBD53 | 56 | 972757 | 1-2789 | 15-2803 | AL521719, AL039239, AL522288, AL521718, AW850549, BE745185, BG036401, BF971064, BF982318, |
| | | | | | AV752274, BE410288, BF970662, BE179100, AA115485, BF037889, AI903708, W74580, AV752030, |
| | | | | | BF207332, AW069193, AW850706, BE260313, AA114996, AI147007, AA287865, BE294206, |
| | | | | | AA779902, AW953654, BF203424, AA287665, BF102950, AW089856, BE081349, AI424273, AI337872, |
| | | | | | W75992, AA039973, AW615357, AA287868, AA040007, AW207183, AW630077, AA844006, AI092051, |
| | | | | | AA035003, AW374784, W79563, AI095505, AI370765, C05140, AI961895, W92237, BF056098, |
| | | | | | AI431633, AA011411, AI381447, AA922567, AA688312, AI860011, AI200662, AA676566, H08173, |
| | | | | | AW590492, BG222429, AI741707, C02948, AA609401, AA427979, AV739012, H29396, AA453991, |
| | | | | | BE894938, H01836, BG165095, BF333733, W70295, BE242586, N41910, AA054984, R24822, |
| | | | | | AA156412, BG055899, H48740, H08272, AI241860, BE763810, T63735, R34728, Z42796, BE936536, |
| | | | | | W88710, AA367891, R36564, Z45070, AA412324, R78131, R56319, AA709055, AA429366, AI915050, |
| | | | | | AW673132, AL522287, R14984, AA347579, AW023366, AA853400, AA853401, W52589, AA476640, |
| | | | | | T39346, W88711, AI282590, T29951, AA411419, AA360166, T80320, AA331893, AI754899, AA602993, |
| | | | | | AA506382, R01609, AA328290, BF808365, N56432, AI832140, AW890834, T31756, R45735, BE929124, |
| | | | | | AA887981, W31306, BE710919, BE169167, AA039914, BF748450, AW381600, BF352203, AA648132, |
| | | | | | AI564214, R36407, AW374826, AA383447, T53688, AW198043, AA368172, T53689, N92423, |
| | | | | | BF237454, AA304402, D79323, AI905754, AA319927, AW197916, AW362124, AW579061, AW579502, |
| | | | | | AW751634, AA054622, BF086800, D25822, BF925479, BG054837, BF904194, BE966011, BE047833, |
| | | | | | AI432570, BE966787, BE965067, AI244343, AI537244, AV682272, BF904176, AI702343, BE965599, |
| | | | | | BE963838, BF814761, BE176075, AW366372, AL513693, AI521799, BE964661, AI684164, AI370623, |
| | | | | | AW020419, AL042365, BE045180, BE965121, AI915201, BF968017, AW813006, AI887775, BF921291, |
| | | | | | BF990167, AI537677, AI500113, BF812963, BE242668, AI624245, BE967255, BE875243, AI623941, |
| | | | | | AI927233, N92140, AI621341, BG029399, AI819663, AI698391, AI251221, AA024941, AI570857, |
| | | | | | AW162194, BG164558, AI250627, BF811808, BE047798, BG104506, AI884459, BF814357, AI439903, |
| | | | | | AV758455, BE964617, AW078839, AI267185, AL046385, BF813196, AI610357, BG178788, AI831938, |
| | | | | | AI919547, AI683897, AW117926, BF337896, AI453248, AI620810, AI591228, AL038529, AW129616, |
| | | | | | AA665587, AW089275, AW079360, AL047854, AW051088, BE408063, AI499483, BF680133, |
| | | | | | BC003125.1, AK027757.1, AK027877.1, AK027466.1, BC008054.1, AL136916.1, AC090645.1, |
| | | | | | AK027827.1, AF086408.1, AC090886.1, AC090004.1, AK024538.1, BC006195.1, AF349466.1, |
| | | | | | AL117457.1, AK026647.1, AC006994.4, AL136767.1, AK025391.1, BC008284.1, AL136786.1, |
| | | | | | AK025414.1, AL389935.1, AL049938.1, AF245044.1, AL137478.1, AK000655.1, BC003104.1, |
| | | | | | AL133559.1, BC003614.1, AL390154.1, AL359623.1, X83544.1, AK026762.1, AL137533.1, AL117435.1, |
| | | | | | AL117648.1, AF114784.1, AK000432.1, L30117.1, AB056420.1, AL133080.1, AB044547.1, AK026494.1, |
| | | | | | AK026534.1, AL157480.1, AL356859.12, AB060211.1, BC008282.1, AL133016.1, BC003602.1, |
| | | | | | AL359615.1, AL050155.1, AL049283.1, AL359596.1, BC008075.1, AK025119.1, AC007597.3, |
| | | | | | AK026550.1, AK026021.1, AL122050.1, S77771.1, AL136862.1, AK027142.1, BC004880.1, BC007248.1, |
| | | | | | AL080234.1, BC007680.1, AK027868.1, BC001418.2, AK024992.1, AK026164.1, AK025209.1, |
| | | | | | AK025431.1, BC001873.1, AK027144.1, BC005843.1, AL096744.1, BC008840.1, AL136842.1, |
| | | | | | BC006287.1, AL080110.1, BC007206.1, BC002539.1, AB050410.1, BC004202.1, AK027146.1, |
| | | | | | AF126488.1, AF061795.1, AF151685.1, AL353940.1, BC001778.1, BC003052.1, BC001967.1, |
| | | | | | AK027103.1, AF110640.1, AK026571.1, AK000618.1, AL137529.1, AK026927.1, AB047631.1, |
| | | | | | AL050277.1, AL137267.1, U88966.1, M86826.1, AL049324.1, AB050533.1, AB048994.1, BC007460.1, |
| | | | | | AL157464.1, AK025798.1, BC006458.1, AJ012755.1, AL137550.1, AC004200.1, AB060908.1, |
| | | | | | AL389957.1, AK025349.1, AK000257.1, AB060914.1, S76508.1, AL137294.1, BC006181.1, AF106862.1, |
| | | | | | BC004292.1, BC009192.1, AB049848.1, X61970.1, AB028451.1, BC003587.1, BC002370.1, AL133081.1, |
| | | | | | AL110296.1, AL133099.1, BC008788.1, BC001963.1, AL136644.1, X99971.1, AL512719.1, M79462.1, |
| | | | | | AF111112.1, BC008708.1, AL133104.1, M64349.1, BC005805.1, Y08864.1, BC006509.1, BC008718.1, |
| | | | | | AK026626.1, AK026613.1, AL512746.1, AL117585.1, AF132730.1, AL583915.1, BC004215.1, |
| | | | | | BC003122.1, AL136787.1, AL137480.1, AL162004.1, AB063091.1, U77594.1, AK026894.1, AB048953.1, |
| | | | | | BC000217.1, BC008591.1, AK026590.1, AK026541.1, AF232009.1, AB060857.1, AF094480.1, |
| | | | | | BC002413.1, BC006207.1, AK024978.1, BC001199.1, U57352.1, AL136864.1, BC000066.1, AL049426.1, |
| | | | | | AK000653.1, AY034001.1, BC008040.1, AB055290.1, AB049892.1, BC005073.1, BC008364.1, |
| | | | | | AK000137.1, BC004899.1, AL133640.1, BC000677.1, BC007456.1, AB048954.1, AF218033.1, |
| | | | | | AB048974.1, AF113222.1, AK025350.1, BC003682.1, BC004310.1, BC002342.1, BC002736.1, |
| | | | | | AL137656.1, AL133619.1, M80340.1, AK024546.1, BC004368.1, BC007499.1, BC004960.1, |
| | | | | | AK026865.1, BC008185.1, BC009221.1, AJ001838.1, AK026504.1, AF069506.1, AL080154.1, |
| | | | | | BC007657.1, BC006410.1, AK026630.1, BC008784.1, AB060917.1, AB055368.1, AF262032.1, |
| | | | | | AL133062.1, AF260566.1, BC001336.1, BC004119.1, AL050143.1, AF081571.1, AL136586.1, |
| | | | | | AL080148.1, AF000145.1, AB062750.1, AF227198.1, AL133665.1, BC009294.1, BC002733.1, |
| | | | | | BC000253.1, AK025383.1, AK026592.1, AK000418.1, BC002809.1, BC001790.1, AK026155.1, AL353957.1, AB047930.1, |
| | | | | | AK027204.1, BC001964.1, AB048975.1, AB060852.1. |
| HDTBV77 | 57 | 785879 | 1-2167 | 15-2181 | BF689672, BE387282, BE898209, BE386984, AA393894, BE893192, W22615, AA134750, BG006306, |
| | | | | | AI769121, BG006608, AA808986, AA367857, AA344170, BG013403, BF368795, AA367892, |
| | | | | | AW605363, BG006302, BF932070, AW948496, AK027375.1, BC004282.1, AK027831.1, AK027849.1. |
| HDTDQ23 | 58 | 1306984 | 1-2193 | 15-2207 | AI872206, BF966561, AW513884, AI912340, BE856991, AI758821, AW337178, BE327923, AW004890, |
| | | | | | AI572080, BG109128, AW058001, BF342854, AW886887, BF967940, AW474823, BF337371, |
| | | | | | BF591084, AA775261, BG164538, AA831357, BE087219, AW074361, AI361820, BF696525, AI982775, |
| | | | | | BF793075, AI690445, AA581345, AU156793, AI917776, D20022, AA825538, BF382552, AI360561, |
| | | | | | AW439592, AI798286, AI140796, AI277190, AA100279, AA485257, AA835492, AI522238, AW517943, |
| | | | | | BG035022, AI015234, AA706811, AI469550, BF197859, AI689240, AW265061, AI744762, AW450726, |
| | | | | | AI884872, BE714642, BE138867, T34498, BF213985, AW769512, BE073192, AA122332, BE138831, |
| | | | | | BF090537, AI811224, BG167993, BE932894, BF980823, AI355770, AA092467, AI471817, BE904497, |
| | | | | | BE719958, AI702026, BE171537, BG166879, AI597962, BG180321, BE171499, BF914841, BF967213, |
| | | | | | BE932875, AI681670, AA089786, BE327680, BE219939, BF032916, AU136610, AI624976, AK001917.1, AF035606.1, |
| | | | | | U58773.1. |
| HE2DE47 | 59 | 619852 | 1-3519 | 15-3533 | AL517387, AL526769, AL526907, AL523193, AL523194, AL515001, AL515002, BG030741, BF980577, |
| | | | | | BE903049, BE729941, BG163644, BE966268, BE067770, BE613706, BE780216, AL138389, BF196312, |
| | | | | | BG177870, AI041824, BE902470, BE384275, AI123426, BE384622, BE298710, BE067771, BE298416, |
| | | | | | BE885382, AI432657, BF966758, BF979153, AI708574, AI814491, BF036235, BF437789, AI720253, |
| | | | | | AI201638, AW182430, BF692903, BE867186, AA911185, BE748929, AW189237, AI432659, BE223052, |
| | | | | | AI687145, BF382011, BE564813, BG036747, AI024779, BE268867, AW029376, BF028837, AI024507, |
| | | | | | AW880654, N47923, AA706430, AA563625, AW662575, BG111471, BE748409, AA232692, AA864782, |
| | | | | | AI016478, BF676114, AW966708, AW958178, AW513800, AA010686, AI376397, AI081671, AA976495, |
| | | | | | AW167417, N98819, AA648548, AI721089, BF574678, AA311869, BF331286, AW731669, BE166594, |
| | | | | | W73934, BF110011, BF247329, BF382964, AA718927, N66559, BE832805, AA679466, AI224843, |
| | | | | | AA972211, W72314, AA664363, AI218733, AI571934, AA703942, AI690284, AW629428, N93202, |
| | | | | | AI350756, W28597, AA251850, AA688326, AA659803, AA143217, AA626686, BE614598, H96804, |
| | | | | | AW008436, BE693652, AA071465, AI041197, AA196284, AA010687, AA199756, Z30115, AW275267, |
| | | | | | N79354, N29375, AW151589, BF900837, AA935300, AA836130, AW673688, AW978790, AA777494, |
| | | | | | AW090055, AI090119, AW468015, R52190, T57886, AI992225, AW303565, AI364081, C18513, H64124, |
| | | | | | AA761409, AW024044, AA988587, AW511332, AW009882, AA332452, AA126237, BF816114, |
| | | | | | AA587628, AW674842, AI654600, H28730, AW519184, AA722914, AA568222, AA766768, AA452758, |
| | | | | | AI660131, T80441, AA743252, AI301049, AI582560, AA354888, AI192985, AW881224, AA659807, |
| | | | | | AA111908, AA384439, AA550787, AW591943, AV737948, AI991751, AW881220, AA768293, |
| | | | | | BF836804, AL517386, AA452580, R52095, AW194374, AI734966, AI094526, AI368645, AI933697, |
| | | | | | R39012, AA641785, AW881273, AA731215, W93220, AW881163, BE832836, AI362123, AA306249, |
| | | | | | AI028585, F09225, AA251954, W38817, R77126, W99334, T90405, AA085837, AA302983, H16312, |
| | | | | | AV739270, T85557, AA126402, AA380638, AA729885, N69096, AI955495, R54396, H16372, W93221, |
| | | | | | AA196142, AA974211, AA609032, AA922821, AA234384, AV744357, AA295432, AV739678, T97675, |
| | | | | | AA470710, AW938060, N62386, F04755, AI696775, AA298259, AA298571, BF939879, AI760728, |
| | | | | | R77125, BF367979, AA376505, AA865813, AA298871, AA492599, AW673976, BG253501, AI933856, |
| | | | | | AA306725, AI363737, AA999867, R25590, AA360269, R26986, AW593198, AI024271, R53081, |
| | | | | | AA143216, BF797376, BE855704, BG230502, AA380483, BC002597.1, AF180473.1, AF113226.1, |
| | | | | | AK000662.1, AB049862.1, AF147398.1, AL137674.1, D17008.1, D17177.1, T57968, R54395, H64171, |
| | | | | | AA010441. |
| HE2NV57 | 60 | 740750 | 1-853 | 15-867 | C05927, R72949, AA327984, AC084730.2, AC016673.5, AC004929.2, AC016716.6, AC008066.4, |
| | | | | | AC003969.1, AC024082.6, AC002302.1, AC013246.13, AC011490.7, AL158064.16, AC084729.2, |
| | | | | | AC078851.4, Z98743.1, AC020610.6, AF195953.1, AC016910.5, AL359394.9, AC005227.2, AC003692.1, |
| | | | | | AC016776.6, AC002300.1, AL451107.6, AL157838.24, AL031737.2, AL050335.32, AC007690.11, |
| | | | | | AC004541.1, AL022401.1, AC018796.4, AL358913.4, AL008583.1, AC005868.1, AL133383.10, |
| | | | | | AC006070.1, AC006211.1, AL359680.4, AL158035.14, AC087072.2, AC009424.2, AL391686.10, |
| | | | | | AP001684.1, AC006013.3, AL356461.15, AC016598.5, AP002980.2, AL158817.11, AL035685.21, |
| | | | | | AC034251.5, AC006134.1, AC020906.6, AL391241.21, AC015983.7, AP003470.2, AP001889.4, |
| | | | | | AL357519.19, AC087430.2, AC005081.3, AC005886.2, AC018509.5, AF277315.3, AC010913.9, |
| | | | | | AB020875.1, AJ011930.1, AL163300.2, AP000952.2, AL133387.8, AP000953.2, AL162503.12, |
| | | | | | AC025765.5, AP002342.3, AL445232.5, AC023114.5, AC004891.1, AL355792.8, AL163280.2, |
| | | | | | AL109662.3, AC010206.8, AL049843.18, AC017076.14, AC009362.8, AC005015.2, AL096791.12, |
| | | | | | AC002487.1, AC010726.4, AL353752.6, AP002846.2, AC005344.1, AC022363.24, AC009498.3, AP001699.1, AL138976.5, |
| | | | | | AC008064.2, AL357507.9, AP001670.1, AL137061.12. |
| HE2PH36 | 61 | 570903 | 1-1544 | 15-1558 | AA329666, AA664883, AL133353.6. |
| HE8DS15 | 62 | 847060 | 1-2185 | 15-2199 | AV725650, BE161426, AW130367, BF343057, AA127680, BF575221, AI096437, BF941499, W58383, |
| | | | | | AI161240, N95226, AW966449, AI356752, AI093508, AI057144, AA044288, AW130361, AI423547, |
| | | | | | AI221152, AI094774, H47283, AI352542, AI891136, AI002491, T53270, AA044116, R48378, R24320, |
| | | | | | AV658066, AI829703, AI819388, BE140169, Z44849, R16574, T39273, AA095159, Z25099, AW273857, |
| | | | | | R16633, AA384077, AI245095, AW026140, T93764, BE927909, N73937, AW118768, AA121543, |
| | | | | | AA995178, AI453845, AA703455, AI452494, AW044037, H40993, R48277, AW629019, T64039, |
| | | | | | AA904647, AW073189, W21055, AW263913, AI096938, Z28777, W03697, AW797518, AI039546, |
| | | | | | AI434419, AW050649, BG003285, AI240412, AA886341, H23905, AI695284, AI767991, H47284, |
| | | | | | AI309041, BE927916, AA724059, AI352281, AI584012, AA618131, AA357401, AI796309, BE936061, AB018301.1, |
| | | | | | AL096772.5. |
| HE9HY07 | 63 | 420063 | 1-818 | 15-832 | |
| HEOMQ63 | 64 | 603533 | 1-1322 | 15-1336 | BG026315, AW102828, AI659843, BE551400, AI640582, BE208434, BF510823, AW955647, BE669917, |
| | | | | | AA789132, AA923523, W44769, AI346827, AI092608, BE267189, AW450220, AI350733, AW090676, |
| | | | | | AA830093, N98535, N69933, BF694104, AI000893, AI379944, AW968025, AA252680, AI202595, |
| | | | | | N32022, AL522177, AI026801, BF514413, AA075433, BG014214, AW452208, BE694426, BG171349, |
| | | | | | AI335272, AI634906, BE796712, AA846518, AA954350, AL522176, AI863776, BE265224, BF359220, |
| | | | | | BF359223, AW386074, BG112515, AV662306, AA973539, AA329532, F22685, AW136310, N28654, |
| | | | | | BG014217, AA610002, BG014216, C02160, W37089, N51549, AA361150, BC005984.1, AL109657.8, AL161659.17, |
| | | | | | AK025977.1. |
| HEPAB80 | 65 | 1307790 | 1-785 | 15-799 | AW274007, AI677890, AW510786, AW468943, AA335322, AI807924, AW172560, AC006116.1, AC011506.3. |
| HFABH95 | 66 | 566712 | 1-1333 | 15-1347 | BF035708, AI431513, AA832175, AI251429, AV729905, AV754716, AI538491, AU122466, AI446474, |
| | | | | | AC005006.2, AC008747.5, AC008805.7, AL160155.19, AC005081.3, AC013751.6, AC006241.1, |
| | | | | | AC004216.1, AL137853.12, AC069285.8, AL590762.1, AC004491.1, AL035659.22, AL158040.13, |
| | | | | | AL022323.7, AL160411.25, AC005231.2, AC005952.1, AC008649.6, AC002059.3, AL355480.22, |
| | | | | | AC007850.29, AC024163.2, AP000501.1, Z98304.1, AL122035.6, AC008569.6, AL360227.17, |
| | | | | | AP000694.1, AC005480.3, AC009470.4, AC008392.6, AC011464.5, AC005911.6, AC008440.8, |
| | | | | | AC013734.4, AL034417.14, AL139082.18, AC005242.1, AP000511.1, AC008403.6, AC040160.4, |
| | | | | | AL353653.19, AP001725.1, AL049776.3, AC004148.1, AC007686.5, Z98946.15, AC007374.6, |
| | | | | | AL137787.11, AC000159.6, AL109984.14, AC002350.1, AC009087.4, AP000351.3, AF240786.1, |
| | | | | | AC005037.2, AC011490.7, AL022238.1, AC006101.3, AL356481.16, AC005971.5, AC010458.5, |
| | | | | | AC025588.1, AC005072.2, AL359091.10, AC008521.5, AC016831.1, AL117330.6, AC006312.8, |
| | | | | | AC007055.3, AC024561.4, Z83826.12, AF196969.1, AC002300.1, AL121891.22, AC005594.1, |
| | | | | | AC010319.7, AL022322.1, AL513008.14, AC008623.4, Z83838.2, AC005972.1, AC006084.1, |
| | | | | | AL117694.5, AC008119.6, AP001711.1, AC005102.1, AC004840.3, AL133174.15, AP002453.3, Z83844.5. |
| HFAEF57 | 67 | 534142 | 1-628 | 15-642 | AV655597, AW967329, AW963498, AV706016, AW966767, AL121984.14. |
| HFCEB37 | 68 | 411345 | 1-788 | 15-802 | AW971191, BE710287, AA493766, D56115, H06701, Z41729, AA285136, AA256963, F04210, |
| | | | | | AL118652, AW893768, AW893769, AW160783, AF258348.1, AC007552.4, AL050152.1. |
| HFFAD59 | 69 | 520369 | 1-456 | 15-470 | AV699250, AV662248, AV699269, AV719565. |
| HFGAD82 | 70 | 513669 | 1-1867 | 15-1881 | AL119979, BF346635, AV726399, BF035097, AV727342, AL119977, BF920864, AW888751, N31682, |
| | | | | | AW148844, AA772781, AA326677, N23200, AW961610, BF976989, BE765872, BE765750, BE765749, |
| | | | | | BE765443, BF570590, BE765618, BF438771, BE766953, BE766490, F06586, BG057153, R60278, |
| | | | | | F07047, AA628815, AV722183, R16237, BF364146, AA204942, AV734361, N71200, AI000462, R54067, |
| | | | | | Z40722, BF337123, R54066, AW903171, H24278, AV726415, H16893, AW897545, H16783, H22887, |
| | | | | | R16238, F03521, R42035, F05678, T80483, AA321847, AV731162, AV731097, AV730504, AV730299, |
| | | | | | AV731130, BE763530, R20855, AA386266, AW890775, R45969, R42611, N94832, R39831, F02857, |
| | | | | | F03323, T03048, R11992, F07675, AU118413, AW890773, AA640468, N95708, F05679, BE830656, |
| | | | | | BF948144, M85660, AL119687, T08757, AV722325, AW904904, BF344999, AI003266, N76471, |
| | | | | | N47227, AW903272, BF977690, T53097, BF918689, F01937, N58994, AI000789, AW898733, BE702498, |
| | | | | | BE699153, AL118827, BE708346, F07242, AW897547, F01938, N51309, AC003037.1, AC022486.4, |
| | | | | | AC007379.2, AC007064.27, AC006548.20, AC016752.2, AC008175.2, AC007965.3, AC007322.4, T66696, T66697. |
| HFIUR10 | 71 | 532060 | 1-527 | 15-541 | BF195618, AA191239, AW969824, AA009856, AW019964, AA808036, BE677291, AW973259, |
| | | | | | AW023662, AV742957, AU146063, AI369580, BG109444, AU153717, AV709074, BG032605, AI357823, |
| | | | | | AW888719, AL110373, AI832009, AV708388, AV725797, BE150580, AA223512, AV734980, |
| | | | | | AA402529, AA595661, AW410201, AA683069, AA191418, AI144036, AW474168, BF681348, |
| | | | | | AI590458, AI590499, F08248, AW302048, AV760508, BE794962, AA665181, H07953, AW971071, |
| | | | | | AA654781, AV763410, AA749035, BF965290, AI609972, BF676985, AV708385, AW504485, |
| | | | | | AV762633, AW166808, AA282951, AI860535, AI792575, AA634889, AW302950, AL048060, AI254913, |
| | | | | | AW875172, AI281689, AA668587, AA084619, BF675051, AI354423, AA832077, AI733129, BF674550, |
| | | | | | AL041924, BE139451, H73550, AA828853, N39953, AW863393, AV757526, AI859946, AW976008, |
| | | | | | AW023111, AA747234, AI565084, AV710482, AW814024, AV710045, AW963482, AI355246, |
| | | | | | AA814925, BE077105, AA653182, AA664521, AW440305, AI054397, AA651639, BF725761, |
| | | | | | AV758073, H15652, BE280771, AW438542, T74524, AW191063, BF940118, AW968205, AV762973, |
| | | | | | AA552578, BF965924, BF879045, AI251034, AI251203, AI251284, AW805539, BG236628, BE878259, |
| | | | | | AI250552, AA632556, BF809041, BG029224, BF868994, AW020736, AF236698, BE139139, AW271904, |
| | | | | | BF978025, BF681424, AU118374, AV758790, BG110480, AI803809, AV758097, AA574442, AV733434, |
| | | | | | BE155302, AA644664, AI792521, BE246472, BE901278, AA626825, AI686913, AV706237, BE155299, |
| | | | | | AW302293, AV702609, AA533123, BE968477, AV738383, BF814446, AI891080, AA516190, |
| | | | | | AA533040, AI284543, BE273825, AW779609, BF525663, AI380617, BF914419, AL079734, BG166965, |
| | | | | | AW069227, AL043351, AI267161, AV762870, AV658819, AV709273, AL042735, AA503018, AI973173, |
| | | | | | AL046746, BE062357, AI963705, T69857, AV730245, BF810071, AW301736, Z97987.1, AC020913.6, |
| | | | | | AL031281.6, AC007637.9, AL096757.1, Z93017.6, AC087225.1, Z83840.7, AC008073.4, AF245699.1, |
| | | | | | AC010349.7, AC087315.21, AL163011.3, AC004106.1, AC004132.1, AC008925.3, AC004990.1, |
| | | | | | AL133351.33, AC010618.7, AC006275.1, AL035405.10, AC034203.7, AC006930.1, AF156495.1, |
| | | | | | AC008754.8, AP001732.1, AL139824.22, AC003037.1, AP001646.4, AC005162.1, AL050341.18, |
| | | | | | AL034420.16, AC024075.4, AL117382.28, AC008521.5, AP001039.1, AL512378.7, AC005778.1, |
| | | | | | AC091394.2, AL132768.15, AL139385.12, AL049569.13, AL109914.16, Z95152.1, AL163541.13, |
| | | | | | AC006367.3, AL442203.12, AC005684.1, AL117377.18, AL109828.22, AL031681.16, AC007488.15, |
| | | | | | AC007425.16, AC018462.4, AC007934.7, AL078602.13, AC010002.6, AC005038.5, AC009743.1, |
| | | | | | AC006538.1, AC053467.1, Z95115.1, AP001922.4, AC010203.13, AC010150.3, AC006545.3, |
| | | | | | AC006546.9, AC004970.2, AP001696.1, AL390736.6, AC003035.1, AL355543.13, AC007318.4, |
| | | | | | AC007381.3, AC006253.4, AC022173.7, AC040160.4, AC003684.1, AC009331.5, AL109823.23, |
| | | | | | AL451107.6, AL359873.11, AC004605.1, AL035682.16, AP002453.3, AC063947.30, AC006270.1, |
| | | | | | AC016526.6, AC003664.1, AL078634.24, AL157897.7, AL009031.1, AL137802.7, AJ251973.1, |
| | | | | | AC002326.1, AL356421.10, AC006388.3, AC078846.2, AL138721.16, AC004103.1, AC090949.1, |
| | | | | | AC090944.1, AL139150.12, AL162423.18, AP001718.1, AL109915.10, AL390208.17, AC004616.1, |
| | | | | | AP002851.2, AC017100.4, AC022425.6, AC006080.1, AC005027.2, AC017006.4, AC024163.2, |
| | | | | | AL049540.11, AC005522.2, AP000353.2, A008008.2, AL445205.14, AC078843.2, AC073864.28, |
| | | | | | AL161657.22, AL031280.6, AL035696.14, Z81364.1, AL157938.22, AC090426.1, AL389883.9, |
| | | | | | AL024474.1, AL138703.10, AC008266.3, AC073057.6, AL132800.4, AC007784.7, AC002996.1, |
| | | | | | AL354816.5, AC011449.6, AP000193.1, AL022313.1, AC008379.6, AP003355.2, AC005004.3, |
| | | | | | AC005514.1, AL118501.22, AL009028.1, Z86064.1, AP002812.3, AL035249.6, AC009131.6, |
| | | | | | AC002549.1, AC032011.14, AL109984.14, AF001549.1, Z84467.1, AL034419.22, AL512883.5, |
| | | | | | AC006204.1, AL353574.8, AC006960.1, AC009079.4, AC009503.3, D87009.1, AL354932.26, |
| | | | | | AC005014.1, AC005859.1, AL139110.17, AC003662.2, AL035089.21, AC005751.1, AL390738.4, |
| | | | | | AL133246.2, AP000694.1, AC020659.5, AL133355.12, AC004854.2, AL359236.4, AC006237.1, |
| | | | | | AK023233.1, Z85999.1, AL022323.7, AC003046.3, AL031730.1, AL160471.5, AL160071.16, |
| | | | | | AC010548.8, Z82206.1, AF029308.1, AC005498.1, AL133342.14, AP000348.1, AC011465.4, |
| | | | | | AC004812.1, AC007221.2, AL022316.2, AL035072.16, Z97630.11, AF312032.1, AC008551.5, |
| | | | | | AC007685.2, AC005034.1, AL391602.6, AC005220.1, AP000117.1, AL023883.6, AP001150.4, |
| | | | | | AL109825.23, AL137782.9, AL096800.20, AF252279.1, AC005695.1, AC016993.4, AC007620.30, |
| | | | | | AL022237.1, AC006481.3, AC018812.5, AL035420.15, AC004611.1, Z84487.2, AC018719.4, |
| | | | | | AC010163.7, AL133344.28, AC011290.3, AC007292.1, AC011895.4, AP001929.4, U63721.1, |
| | | | | | AC002352.1, AC011444.5, AC005327.1, AL451075.15, AC004595.1, AL138720.19, AL451185.14, |
| | | | | | AC002470.17, AL008732.1, AC006460.3, AL137119.26, AC005786.1, AC006211.1, AF134726.1, AC010205.5, U52112.1, |
| | | | | | AC007597.3, AC016026.13, AC005215.1. |
| HFTBM50 | 72 | 545012 | 1-748 | 15-762 | AL529436, BG254023, AA069656, AW512689, AA928735, BE901109, AL529437, BE074967, |
| | | | | | BE074973, AA423996, AI027673, AI130940, AA827360, AA424006, AA421599, AW602733, AI580837, |
| | | | | | AL526924, AA114876, AA576953, AI858981, BF222157, AL526960, BF542049, AA136831, AI200715, |
| | | | | | AI358322, AA988755, AW602739, AA187921, AL527090, H10340, AI499041, H10044, AA252300, |
| | | | | | AA188494, AA856927, R44331, AA588683, AW364266, BE092940, BE007334, R51006, AI253378, |
| | | | | | AA481649, AI686745, AI628242, BE092920, BF733881, AA729977, BF026424, AW804569, AA421594, |
| | | | | | AW994967, AA481416, BE733257, BF876214, AA679567, AW028221, AU134538, BE251492, BE729280, AI906091, |
| | | | | | BC002480.1, AK023414.1, AP002347.3. |
| HFTDZ36 | 73 | 545726 | 1-1089 | 15-1103 | AV721599, BF732420, BF510533, BF508158, BF508241, AI638188, AW181935, AI758929, AW592730, |
| | | | | | BE967495, AA447514, AI078837, AV723652, AI218418, BF692673, AA884756, AI335250, AW118870, |
| | | | | | BE044339, AA426363, AV730822, AI868197, BF947599, AA927228, BF952754, BF952302, BF952504, |
| | | | | | AW905268, AW905266, BF952591, AI673798, BF952850, BF952505, AW905263, BF952750, BF952589, |
| | | | | | BF952851, BF952752, AA897687, BF572515, AW905328, BE699539, AI830527, BF952755, BF210822, |
| | | | | | AA431528, AA029326, H41714, AA437157, N53641, BE699547, AW905379, BE699537, BE796741, AW898982, AI218421, |
| | | | | | AF289076.2, AC067967.2. |
| HFXBL33 | 74 | 778070 | 1-1619 | 15-1633 | BG141322, AV652809, AV662223, AV699247, AV699167, AV662247, AW963961, AV699098, |
| | | | | | AV662272, AV725496, AV727824, AV699218, AV719825, AV719156, AV699200, AW952432, |
| | | | | | AV720062, AV720893, AV653163, AV650903. |
| HFXJX44 | 75 | 701988 | 1-1370 | 15-1384 | AC004491.1, AC024579.4, AL136084.11, AC016564.5, AC005015.2, AC007011.1. |
| HFXKT05 | 76 | 658690 | 1-1701 | 15-1715 | AU124431, AW960435, BF525944, AA781090, AW514159, AW390483, AW965129, AW170237, |
| | | | | | AW582015, AI700395, AI079309, AW339256, AI140441, BE700940, BE842726, BE842730, BE700936, |
| | | | | | BE700869, AW581975, AI022857, AI903097, AI401014, AI379419, BE700861, BE700862, BE772035, |
| | | | | | AI434349, BE772040, BE772042, AW673336, BE700873, BE700876, BE842723, BF439588, BE700941, |
| | | | | | BE700945, BE700943, BE772099, BE700938, AA703354, N50989, BE772066, BE700937, AA719006, |
| | | | | | BE908235, BE772053, BE772081, H69547, BE700904, BE772059, AA574083, BE830929, BE772082, |
| | | | | | BE818955, BE818958, BE772101, AI251845, AI243536, BE772019, BF870875, BE818964, AW517983, |
| | | | | | BE700851, AI983670, BE772020, BF359589, H70004, AW820559, BE840628, BE700898, T63151, |
| | | | | | BG012510, R11344, AA305705, BE818962, BE840434, BE840457, AW752129, AA565124, BG010792, |
| | | | | | BF849721, BE772047, AI905362, AA731490, BE818915, BE772087, BE772018, BE772074, BF110884, |
| | | | | | R14845, BE772086, BE772015, AI983820, AA344670, AA889063, R07438, BE840445, C15468, T63006, |
| | | | | | BE170135, R09631, R06659, BE772017, BE836162, AI540442, BE830923, AI023272, AW868068, |
| | | | | | BE830919, AW868069, BE818892, AA324635, AW960971, BE818951, AW674579, BE832289, |
| | | | | | BF091071, AK001249.2, AB007936.1, AK027078.1, AL117402.1. |
| HGBHI35 | 77 | 570262 | 1-1423 | 15-1437 | AW027617, AW167655, AV705616, BF112047, AV647323, AI761852, AV647362, BF475491, |
| | | | | | BF941241, AU134617, AW273477, AA632135, BF589834, AW188958, BE328783, BF673582, |
| | | | | | AW025350, AW469123, AI248475, AW071025, AW513405, AV707439, AA443956, AW959532, |
| | | | | | AA974499, AA586906, AA411210, AA748561, AV647324, AA574049, BF001545, AA993212, |
| | | | | | AU155540, AA405832, AA418055, T65000, AA633212, AA417996, AA716696, AW338423, AI951713, |
| | | | | | AW269824, AA705781, AW294610, N29931, AW193961, W74344, AI623473, W95062, N58311, |
| | | | | | AA434443, AI452555, AI476814, AI707848, AI591113, AW071570, AA504192, AI284330, AA993753, |
| | | | | | AA422102, AA814543, AA833607, R59175, H69589, N27730, N27744, AI050821, H91466, AV661353, |
| | | | | | N26927, AA384582, T53881, AA723025, AW952885, AA708478, AA412129, N80150, AA805411, |
| | | | | | AA325056, H86073, AW080735, AA719996, H48787, AW439101, AA327279, AW439110, R72184, |
| | | | | | AA317298, AA290758, AI302593, AI041429, AA932990, AV692965, H68481, AA290757, AI301278, |
| | | | | | AA928847, AV709914, R70407, AA342345, AW971285, T71152, AA528307, R00838, AI915200, |
| | | | | | AI470398, AA888272, T50944, T54028, AI784177, R69430, AI298655, AI801093, AA363967, |
| | | | | | AA935078, AA935062, T99499, AW450038, F37718, AI470409, AA419235, AW074842, AA700546, |
| | | | | | BF057503, AV656088, AI798643, AA946561, AV684912, C05231, AA342344, AA405831, AI682312, |
| | | | | | R72230, AV696820, AI557037, T72850, BG122003, AI478342, AA504193, AI474859, W91943, |
| | | | | | BG164862, AW841423, AI243763, AI364219, AA879063, AA419337, AV698254, BF847168, BG004190, AK001810.1. |
| HGLAF75 | 78 | 566838 | 1-762 | 15-776 | AW968403, AW268460, AV699333, BE388094, BE387809, AA805707, BF112044, AA769677, |
| | | | | | AI379717, AI419895, AI858342, AI708860, AA044030, AA465222, AI677780, AI189447, AI221144, |
| | | | | | AI073526, AI286149, AI540808, AI298414, AA847808, N29749, AW170779, AA344901, AA044352, |
| | | | | | R52970, BE836466, BE716265, BG057223, BE836496, H40701, R55340, AA873679, AI363753, |
| | | | | | BF792412, R40137, AW965142, AA725486, AA344902, T27542, BE716174, N57171. |
| HHENV10 | 79 | 562772 | 1-1141 | 15-1155 | AC004912.1. |
| HHGCG53 | 80 | 340818 | 1-393 | 15-407 | |
| HHGCM76 | 81 | 662329 | 1-697 | 15-711 | AW248957, BF828801, BF828604, AI675194, AW028119, BF826770, BF827069, AW452880, AI491913, |
| | | | | | AI799880, AW450970, AI377883, AI201976, AA595164, AI088096, AW612440, BE792795, AW006952, |
| | | | | | BF063362, AI697133, AA643065, AA580017, AI819005, AI866931, AI560641, AA635584, BF446220, |
| | | | | | AI829011, AW952316, AL524066, AW243832, AI200458, AI634449, AI670745, AI269568, AA326815, |
| | | | | | AI873666, AL523219, AL520944, AI478177, L31980, AW245254, AW194690, AW771866, AI767850, |
| | | | | | AW079488, T87766, D45523, BE242113, AA055697, AI306732, AW275312, BE280419, AI908657, R48473, AA013188, |
| | | | | | AI908646, BG250796, BE796614, T72628, BC002980.1, AC003665.1. |
| HHPEN62 | 82 | 695134 | 1-2138 | 15-2152 | AI939620, AI480056, AW300615, AW300620, AI589129, BE386438, BF920454, BE386547, AW961851, |
| | | | | | AI911546, AV726263, AI361251, AI498527, AV725146, AW901919, BE967591, H41544, AA326679, AA348503, |
| | | | | | AI422476, AA912288, AI423129, BC004271.1. |
| HJABB94 | 83 | 456466 | 1-1541 | 15-1555 | BE905356, AI026821, AA503776, BF114724, AI435527, AL036946, AW298357, BF240642, AA969442, |
| | | | | | AI767392, AI142574, AI094514, AW073866, AW241144, AA206595, AA040034, AA354909, AW972134, AA814156, |
| | | | | | AA933895, AA040828, C01416, AA457220, AL138875.8, AY027525.1. |
| HJACG30 | 84 | 895505 | 1-1518 | 15-1532 | AA311188, BF940968, AI478697, AA309875, AA481249, AL533052, AA481563, AW242463, |
| | | | | | AA760629, AV651897, AV660258, AV661286, AV709580, AV653353, AV726590, AV703632, |
| | | | | | AV725255, AW960067, AV705453, AV726243, AV652001, AV704144, AV726194, AW956292, |
| | | | | | AW949777, AV708520, AV727618, AW959858, AV656283, AW967329, AV727932, AV728953, |
| | | | | | AV725582, AV708786, AV708872, AV661369, AW952013, AV705340, AV704234, AW965148, |
| | | | | | AV726156, AV705836, AV708991, AV725618, AW952301, AW958796, AV725596, AV709248, |
| | | | | | AW959986, AV726337, AV709407, AV728355, AV725031, AV707948, AV725441, AV729424, |
| | | | | | AV652528, AV725577, AV707556, AV704626, AV702071, AV706223, AV705665, AV704785, |
| | | | | | AV728404, AV709733, AV729366, AV708320, AV705343, AV727822, AV707264, AV704611, |
| | | | | | AV729473, AV702738, AV725321, AV690930, AV728743, AV727978, AV727337, AV727562, |
| | | | | | AV729129, AV704712, AV701953, AV727052, AW955629, AV729532, AV704520, AV706964, |
| | | | | | AV704973, AV702817, AV705504, AV709356, AV704279, AV705829, AV702164, AV701880, |
| | | | | | AV701626, AV707401, AV704756, AW955019, AV701183, AV728289, AV708203, AV703591, |
| | | | | | AV697880, AV647941, AV703417, AV753624, AW963446, AV654035, AV709935, AV726628, |
| | | | | | AV707654, AV706290, AV655552, AV654282, AW949521, AV709880, AV709939, AV705189, |
| | | | | | AV704686, AV706882, AV727314, AV702954, AV727238, AV691615, AW967328, AV682997, |
| | | | | | AV727126, AV727347, AV728652, AV702787, AV706162, AV709596, AV686417, AV701728, |
| | | | | | AV701873, AV656240, AV692972, AV694871, AV705239, AV727459, AV655901, AV728715, |
| | | | | | AV701499, AV703972, AV703090, AV707794, AV702790, AV728546, AV705267, AV703762, |
| | | | | | AV703273, AV706734, AV702854, AV709025, AV706025, AV705684, AV656224, AV705299, |
| | | | | | AV709273, AV706165, AV727343, AV709932, AV702625, AV727468, AV707088, AV709549, |
| | | | | | AV645545, AV702498, AV701874, AV706671, AV705433, AV705866, AV728255, AV709256, |
| | | | | | AV706076, AV726559, AV651075, AV702537, AV706279, AV703436, AV727103, AV704097, |
| | | | | | AV726653, AV706532, AV706133, AV701496, AV658784, AV727807, AV728459, AV729077, |
| | | | | | AV707804, AV704592, AV704974, AV701858, AV703456, AV703515, AV702280, AV727032, |
| | | | | | AV705416, AV704116, AV702728, AV706910, AV727047, AV706889, AV705014, AV705047, |
| | | | | | AV703035, AV701538, AV727029, AV702869, AV725380, AV728455, AV706741, AV707830, |
| | | | | | AV707510, AV704971, AV706683, AV725956, AV707769, AV705234, AV706891, AV706527, |
| | | | | | AV728471, AV706758, AV690921, AV707798, AV725991, AV702725, AV724987, AV706448, |
| | | | | | AV725845, AV685113, AV726789, AV725387, AV726830, AV726787, AV702417, AV701844, |
| | | | | | AV702851, AV727189, AV706655, AV725386, AV655067, AW962136, AV706992, AV707420, |
| | | | | | AV706183, AV703366, AB000616.1, U94592.1, AJ244005.1, AJ244004.1, AJ244003.1, AJ244007.1, |
| | | | | | D78345.1, D50010.1, D13316.1, AB025273.1, AF144029.1, AJ276256.1, AJ276254.1, Z30183.1, AF144028.1, X82834.1, |
| | | | | | Y14219.1, U45328.1, AB005666.1, S81957.1. |
| HJBCY35 | 85 | 719729 | 1-1545 | 15-1559 | AL518865, AL526445, AL518864, BF690211, BE795952, BG261247, BG122941, BE871131, BF342499, |
| | | | | | BF797882, BG034854, BE874386, BF684303, AW958340, BF055513, BE265238, BF055496, AL042954, |
| | | | | | AL044311, AW393087, BF590235, BE251517, BF688851, AW500006, BF750912, BF436031, BE207255, |
| | | | | | AI523943, AI809559, AW615714, AI088845, AI199469, AI088821, BE792741, AA707004, AI393362, |
| | | | | | AI859578, AA864359, AI359119, AI963339, AA259086, AW027379, AA186786, AA703021, AA305929, |
| | | | | | AA393356, BE729570, AI961726, AW274049, AI216448, AW503180, AW505339, AI015694, AA291342, |
| | | | | | AI049539, AW873566, AI092749, BE410341, AI817912, AI870620, H44330, AI366215, AA258242, |
| | | | | | R46300, R16949, AI744596, R54656, BE386449, BE410337, AI807057, AW081887, AL041401, H15972, |
| | | | | | BE710574, BE410414, BE535502, BE222788, AA398688, AW273864, AA404987, D59795, AA077661, |
| | | | | | BE047327, T10451, AI871075, D59810, AI368575, BF526818, AA962247, AA335735, AW000813, |
| | | | | | BF435172, AA188015, R75708, AA329264, BE713106, AI218840, AA329538, AA291343, AA826970, |
| | | | | | T35806, R10855, D59833, D59821, BE547124, D80231, AI080034, AA299767, BF203222, AI908002, |
| | | | | | AA973311, AW087244, BF920764, AI648592, D80329, BE537114, BF511965, D59677, W93021, |
| | | | | | AI919083, AA749327, R16895, R55419, AA354448, AA136776, R54853, R46205, D59561, AI969256, |
| | | | | | W51754, AW273865, R10856, AI452772, BF765954, R10335, BF858687, AA076725, BF955782, BF206768, BF310354, |
| | | | | | BF032473, C01203, BC004286.1, AL050110.1, AB037861.1, AL137358.1. |
| HJPAD75 | 86 | 651337 | 1-1217 | 15-1231 | AL530365, AL524811, BG035149, AL524846, AV653215, AL525028, BF031163, BE464161, BF064198, |
| | | | | | BG057645, BE677690, AV714679, AI954819, AA708718, AA773040, AW206827, BE677490, |
| | | | | | AW590005, AL522800, AI075390, BG179367, AI933314, AA022693, AA563665, AI582700, BF591973, |
| | | | | | AI933036, AA011394, BE463890, AI304827, AW467513, AI675049, N47573, BE537595, AI075392, |
| | | | | | AI346305, AL514603, W26975, H02832, AI290715, AA535130, AW137781, AW298065, BF927479, |
| | | | | | AA917670, AA011431, AL530366, AA974770, AA535120, AI497684, AI277012, AI274193, AL514604, |
| | | | | | AW297638, AW779938, AA356778, AW067366, AL524812, AL524847, BF763877, AV652546, H03723, |
| | | | | | F09604, F09318, H83110, AA216050, AW573003, BF926201, AI572540, AL525029, BF092250, D80466, AI940747, |
| | | | | | AK027129.1, BC008984.1, AF043945.2, AL163284.2. |
| HKABZ65 | 87 | 862030 | 1-1175 | 15-1189 | AA715814, AA503019, AV762033, BE155099, AV734997, BF917346, AW338860, AC011666.28, |
| | | | | | AF242518.1, AF109907.1, AC004867.5, AC020917.4, AC004166.12, AL356915.19, AC005071.2, |
| | | | | | AC004878.2, AC005052.2, AC005081.3, AC002549.1, AL590763.1, AC020663.1, AC006064.9, |
| | | | | | AC008745.6, AC004858.2, AC022405.5, AC007666.12, AC008750.7, AL451144.5, AP001716.1, |
| | | | | | AC009131.6, AC004656.1, AL109825.23, AL355312.24, AL035086.12, AC010605.4, AC004067.1, |
| | | | | | AC004477.1, AC008736.6, AL109915.10, AC006023.2, AL033529.25, AC007637.9, AL139317.5, |
| | | | | | AL031311.1, AL049776.3, AC004971.3, AC009220.10, AL080243.21, AC005015.2, AC004686.1, |
| | | | | | AL022318.2, AC002310.1, AC009123.6, Z93015.9, AC021999.4, AL355353.23, AL050318.13, |
| | | | | | AL161756.6, AC011464.5, AL132712.4, AL359513.12, AC007546.5, AP001695.1, AL035683.9, |
| | | | | | AC018711.4, D87675.1, AL133444.4, AL139100.9, AF030453.1, AC006077.1, AC008895.7, AP001713.1, |
| | | | | | Z84487.2, AL357153.4, AL163636.6, AL359382.23, AC004770.1, AP001972.4, AC004675.1, |
| | | | | | AL355392.7, AC020906.6, AL138784.30, AC020754.4, AL162426.20, AC002288.1, AC009068.10, |
| | | | | | AC008101.15, AC008623.4, AC008891.7, Z98884.11, AL136137.15, AC011247.10, AL133163.2, |
| | | | | | AP001727.1, AC005098.2, AC004659.1, AC005670.1, AL139022.4, AC009812.17, AF088219.1, |
| | | | | | AL035404.20, AL139801.17, AF228703.1, AC002492.1, AC006084.1, AL353594.13, AC005077.5, |
| | | | | | AL160271.19, AP001724.1, AC008537.5, AC024561.4, AL139353.3, AC004491.1, AC008626.5, |
| | | | | | AL391987.15, AC010530.7, AP003352.2, AC009267.15, AL122013.5, AP000008.1, AC087071.2, |
| | | | | | AC009314.4, AC020913.6, AL078463.11, AL096700.14, AC002369.1, AC010102.3, AP003357.2, |
| | | | | | AL031123.14, Z95331.2, AL513008.14, AL118501.22, AP001435.2, AC005200.1, AJ400877.1, |
| | | | | | AC011469.6, AC016772.8, AC005089.2, AC005088.2, AF312912.1, AL022316.2, AL080317.11, |
| | | | | | AP001693.1, AP000553.1, AL390294.19, AC006345.4, AC091394.2, AL359813.23, AC007283.3, |
| | | | | | AL353807.18, AL109921.21, AC074121.16, Z98742.5, AC007383.4, AF243527.1, AC027130.5, |
| | | | | | AC010504.7, AL035462.21, AC010650.8, AC005180.2, AF334404.1, AL139187.19, AC005037.2, AL021391.2. |
| HKACB56 | 88 | 554616 | 1-482 | 15-496 | AI935239, BE122852, U51140, BG121875, BF970449, BE879967, BE545287, AI311480, BF968910, |
| | | | | | AI207454, BG031442, BF815930, BF792050, BF339322, AI924051, R99209, AA669025, AA505147, |
| | | | | | AA806160, AK026797.1, BC000650.1, AB060839.1, AL133557.1, BC009192.1, AL136622.1, |
| | | | | | AB048888.1, AL512754.1, BC002485.1, BC004908.1, AF004162.1, AL358532.11, BC004181.1, BC006251.1, AK026603.1, |
| | | | | | AK000647.1, AK024974.1, S69510.1, BC008823.1. |
| HKACD58 | 89 | 135220 | 1-3139 | 15-3153 | AL528271, BE513051, BE874633, BE727126, BG119953, AA877796, BE897630, BE616928, BE873485, |
| | | | | | BE409112, BF568632, BE886189, BE890308, BE259677, BE389188, BE386943, BG033053, AW957771, |
| | | | | | AW880570, BE389298, BE782739, BE042596, AI829975, AW027434, AI335269, AI525602, BF382771, |
| | | | | | AA495894, AW402301, N46240, BE735624, BF887879, BE258030, AI819188, BE349022, AW008354, |
| | | | | | BF509970, AI683541, H38504, AI365603, AA178917, AA180758, BE812358, BG250135, BE874703, |
| | | | | | AW390227, BG029976, BE812223, AA354527, AA178918, AI204915, AW194439, AW390207, |
| | | | | | BF875432, AA425001, AW368379, R88102, BE932912, BF511057, BE932910, BE301126, BF912732, |
| | | | | | AI360437, AA370005, BE764970, R69656, R53778, BE830394, AA134615, BE697358, R54897, F37313, |
| | | | | | AL536107, AI280553, F34525, BE171591, AI524965, AW880505, F27458, AI193372, R55008, |
| | | | | | AW339374, AW999021, BF885645, AA227281, BF799341, BE410974, R55146, AI651533, AA355898, |
| | | | | | AA149032, H21738, BE937883, R78049, T74386, T27237, R69572, H22354, AW946340, AW169264, |
| | | | | | AI630501, AI699781, BG001443, AA343322, BF932030, AI971329, BF813656, AI096656, AI367032, |
| | | | | | AA380842, AL138431, H22385, BF929569, T50676, BE393507, D29121, AA668973, BF934053, |
| | | | | | BE206656, AI620083, AI493047, AI872461, H29733, BF793181, BC006159.1, X80590.1, AL050037.1, |
| | | | | | AC006457.3, AC006455.2, BC000224.1, AF075046.1, AL117382.28, AC009242.5, AC002565.1, |
| | | | | | AC009314.4, AC011005.7, AC007934.7, AP000547.1, AL442096.1, AC083866.2, AC008551.5, |
| | | | | | AC020550.4, AC002365.1, AF001548.1, AC008073.4, AC005225.2, AL590762.1, AC010792.4, |
| | | | | | AL365332.9, AC004491.1, AC004686.1, AC004551.1, AP000744.4, Z84480.1, AC005484.2, AC006236.1, |
| | | | | | AC005622.1, AL135749.3, AL158198.14, AL034548.25, Z82214.23, AC012597.24, AL161781.12, |
| | | | | | AC009137.6, AC018636.4, AC011362.2, AC005899.1, AC004965.2, AC006241.1, AC005098.2, |
| | | | | | AC002563.1, AC091394.2, AP000338.2, Z83844.5, AL096701.14, AC009228.4, AP000216.1, |
| | | | | | AC019171.4, AL445645.10, AC007371.16, AL365364.19, Z93015.9, AL391241.21, AC009120.8, |
| | | | | | AC091492.1, AL358434.16, AL049776.3, U82828.1, AC005520.2, AF196779.1, AL358777.12, |
| | | | | | AC010271.6, AC002352.1, AL133245.2, AP000337.1, AL139100.9, AC004253.1, AC004149.1, |
| | | | | | AL158167.15, AL034420.16, AC004386.1, AP001760.1, AF111168.2, AC018639.8, AL353812.13, |
| | | | | | AC004953.1, AC006487.8, AC010616.5, AC009812.17, AL445493.8, AC008670.4, AC004770.1, |
| | | | | | AL117692.5, AC004166.12, AC005821.1, AC004144.1, AL159168.15, AC005071.2, AC008764.7, |
| | | | | | AC008892.5, AC009247.12, AC004867.5, AC010605.4, AC005103.3, AF047825.1, AL121834.20, |
| | | | | | AC078846.2, AL117334.29, AL163973.1, AC074121.16, AC004824.3, AL138849.12, AC011497.6, |
| | | | | | AL391868.15, AC007021.3, AC008655.6, AP000500.1, AC006038.2, AL160175.5, AC010422.7, |
| | | | | | AL109920.15, AC011465.4, AL109976.23, Z85987.13, AC090939.1, AP000102.1, AL136418.4, |
| | | | | | AL139054.1, AD000092.1, AL031311.1, AL034549.19, AC010543.8, AC007336.5, AL033543.6, |
| | | | | | AL590763.1, AL136137.15, AL050349.27, AC005067.2, AC005412.6, AL139343.9, AL121895.26, |
| | | | | | AP000115.1, AC006101.3, AC010512.7, AC002418.1, AC018695.6, Z98941.1, AC020915.6, AC027319.5, |
| | | | | | AC004150.8, AC006345.4, AC009049.3, AC008403.6, AC005488.2, AC005207.1, AL121900.26, |
| | | | | | AC020904.6, AC008066.4, AC007374.6, AP001727.1, AL136228.8, AC025166.7, AC083871.2, AC008752.6, AC008569.6, |
| | | | | | AC005089.2, AC013429.12. |
| HKAEV06 | 90 | 1352263 | 1-2482 | 15-2496 | AU133136, AV762150, AW967049, AI114751, BF678978, BF698605, BE536006, AA317243, BE748143, |
| | | | | | BG163940, BE789994, BF724673, BG231175, H06819, R19670, AA081581, BF129960, AA334334, |
| | | | | | H26678, BF332901, BE159061, BE159060, BE159062, BF818584, BF819690, BG115835, BF986034, |
| | | | | | BF819681, BE872393, BG236735, AL118991, AA515224, BF822777, AW872676, AW630298, AI291124, |
| | | | | | AW872575, AI801482, BE677379, AI801591, AI873916, AI017024, AW794809, AI291268, AI061296, |
| | | | | | BE883501, AW467340, AA482681, AI200051, AI245679, AW467362, AA525790, AV681599, |
| | | | | | AV760191, AI192631, AA620411, BE677026, AW473163, AW102849, BE042475, AV738303, |
| | | | | | AV715162, AA348017, R97934, AV761745, AV764609, AV761286, AK001708.1, AK000169.1, |
| | | | | | BC008120.1, AL035246.13, M13254.1, AC003681.1, AL022238.1, M87917.1, AC005779.1, AC011495.6, |
| | | | | | AC004918.1, AF045555.1, AC005757.1, AC022148.5, AC000085.5, Z70289.1, AC004926.2, AF085444.1, |
| | | | | | AC007570.23, AC007066.4, AP000513.1, AL139100.9, AC005089.2, AL133387.8, AC011442.5, |
| | | | | | AB023052.1, AC000052.16, AC005104.1, AC009225.3, U67828.1, AC005484.2, AF254822.1, |
| | | | | | AC004477.1, AL022721.1, AC004159.1, Z99128.1, AL356481.16, AC007021.3, AC006530.4, |
| | | | | | AC010642.5, AL355497.14, AC005940.3, AL049757.14, AP000744.4, AC010506.6, AL034451.26, |
| | | | | | AL139317.5, AC018828.3, AL080317.11, AC011500.7, AC022383.3, U63721.1, AC011464.5, |
| | | | | | AC007536.9, AL359457.12, AC004854.2, AC009412.6, AC011497.6, AC005057.2, BC004147.1, |
| | | | | | AL035681.13, AL356499.16, AL450226.1, AL022329.9, AL133332.12, U95740.1, AC002369.1, |
| | | | | | AC020750.3, AL122004.17, AC006452.4, AL021391.2, AC006312.8, AL158159.14, U78045.1, |
| | | | | | AC002984.1, AC083855.2, AC004662.1, M19045.1, J03801.1, AP000842.4, AC018758.2, AP000553.1, |
| | | | | | AL451125.7, AC004973.1, AC018751.30, AL133245.2, AC008486.6, AL391827.18, AC073316.6, |
| | | | | | AC006468.9, AL049759.10, AC004000.1, AC018809.4, L78810.1, AL355385.15, AC010358.5, Z98949.1, |
| | | | | | AC005204.1, AC027644.9, AL133376.6, AC004019.20, AL122023.3, AC005056.2, AJ003147.1, |
| | | | | | AC007011.1, AC005368.1, AL132838.4, L81693.1, Z68756.1, AP003357.2, AL122003.17, AF207550.1, |
| | | | | | AF012654.1, AC026882.5, AC006511.5, AP000115.1, AL117333.26, AC083868.2, AC005184.1, |
| | | | | | AC005264.1, AC024166.3, AC016601.6, U95090.1, AL163279.2, AP000306.1, AL138759.20, |
| | | | | | AC068533.7, AC016697.8, AC002460.1, AP000349.1, AL137077.31, AC008536.6, AL031281.6, |
| | | | | | AL022322.1, AL031668.23, AC025165.27, AC066580.3, AP001680.1, AC034193.4, AC016831.1, |
| | | | | | AC079363.19, AL590762.1, AL121777.39, AC008443.8, AC006277.1, AL136170.12, AC005261.1, |
| | | | | | AC020931.5, AC004814.2, AC005695.1, AC010150.3, AC026475.6, AC008610.6, AC002288.1, |
| | | | | | AC004867.5, AF165926.2, AC007163.3, AC025679.4, AC009086.5, Z83844.5, AC007546.5, AC004476.1, |
| | | | | | AL096840.25, AF373586.1, AE006639.1, AC019097.5, AC010645.5, AC091529.1, AC068660.3, |
| | | | | | AL034420.16, AC009499.4, AC022384.4, AL157938.22, AC004821.3, AF196779.1, AL159168.15, |
| | | | | | AC008403.6, AL445201.14, AL162491.10, AL450343.4, AC004224.1, AL031255.1, AC009007.4, AC004966.2. |
| HKAFT66 | 91 | 946512 | 1-987 | 15-1001 | AA436785, AI804932, AA310516, AW966935, AA873013, AA251417, AI798761, AA250867, BE720668, |
| | | | | | AW827206, BG122481, AI826225, AI811785, AI539808, BF970449, AL039086, AW983783, AI554821, |
| | | | | | AI784252, AW105601, AV708119, AW054931, AV727839, BF968205, AL119863, AI280747, AI611738, |
| | | | | | BE047737, BF970768, AW193134, AW118518, BF904265, BF089711, AI610362, AL042628, BF793370, |
| | | | | | AL036980, AI312428, AA833760, AL513763, AI829327, AI433384, AI589267, AI269862, AI564723, |
| | | | | | BG031539, AI624548, AW302992, BG260037, AI802542, AI569583, AW169653, AI800453, BE048071, |
| | | | | | BF792961, AI439717, AI567612, AI611348, AI869367, AW081797, BF343172, BG031815, AL038605, |
| | | | | | AI570781, AW051258, AL513901, AI802240, AI274728, AW071417, AI571909, BG249582, BG257535, |
| | | | | | AW152469, AI612885, AW022682, AW148320, AI569579, AI252023, AI608936, AW075413, AI500077, |
| | | | | | AI318280, BE781369, AI636585, AI251434, AI862144, BG255895, AI890806, AI625094, AI955906, |
| | | | | | AI309401, BG110517, AI431424, AI343112, AI612913, BG110684, BE895003, BG168549, AW268253, |
| | | | | | AW301300, AI349598, AI554344, AL036664, AW075207, BE886728, AI345735, AI678357, BE964078, |
| | | | | | BF872670, AI475394, AI633419, AI348897, BF904258, BE138712, AI500659, BE966699, AI247193, |
| | | | | | BE887488, BG030364, AI648684, AI313320, AI627988, AI251221, AI630928, AI340627, AA640779, |
| | | | | | AI340603, BF904263, BE910373, AV743962, AI587143, AI312146, AI312339, AA572758, AI889168, |
| | | | | | AI345258, AI348854, AW193000, BE964614, BF817926, BE965432, AW020693, AI457369, AL040243, |
| | | | | | AI445115, AI620866, AL513699, AW081242, AI610645, AI801325, AI866798, AI932794, AI689248, |
| | | | | | AI340582, BG110241, AA225339, AA427700, AI270707, BG179993, AV682672, AW827228, AI955467, |
| | | | | | AI681985, AI684265, BE895585, AW074993, AI349614, AI590415, AI811353, AI354283, BF868928, |
| | | | | | BE885241, AI564247, BG058398, AI302910, AI955917, AI349256, AW946806, AI312152, AI174394, |
| | | | | | AV682867, H89138, AW075084, AI567351, AI800433, AI950664, BE048179, AL036288, AI634224, |
| | | | | | AI349937, AW089572, AI334884, AL039132, AV651436, AI670009, AI349957, AI307708, AI312325, |
| | | | | | BF981774, AW269097, AI609409, BG036846, AI591420, AW190042, AI572892, AL045266, BF971016, |
| | | | | | AV682218, AL121286, AI916419, BF925729, BF339322, AI307520, AI925156, AI445237, BE047952, |
| | | | | | BG180996, AI306613, BE544111, BE885353, AI434256, AV708097, AV712838, BF924882, BF885000, |
| | | | | | BG113299, AV757028, AA012905, AI917123, AL134999, AW075351, AV682521, AI874166, AL036736, |
| | | | | | AL036901, BG168696, AW151138, AW268302, BG033723, AW023590, AI306705, AI436456, AI608667, |
| | | | | | AV682763, W33163, AI282281, BE785868, AW170635, BG250190, AW073994, AL390882.12, |
| | | | | | AK027164.1, AF056191.1, BC003687.1, AK000432.1, AL512733.1, AK024538.1, AL157482.1, |
| | | | | | AF177336.1, AL117460.1, X72889.1, AF090934.1, AL359601.1, AK026526.1, BC008488.1, AK024524.1, |
| | | | | | AK024588.1, BC001045.1, AL136787.1, AB047904.1, AL049452.1, AK025084.1, AK026947.1, |
| | | | | | AL512750.1, AF090896.1, AL136845.1, AL050146.1, AK026855.1, AK026597.1, AB048954.1, |
| | | | | | AB056420.1, AL137560.1, AL136749.1, AK027868.1, AK027096.1, AL359583.1, AL136844.1, |
| | | | | | AB060852.1, AL157431.1, AB060826.1, AB060916.1, AB060825.1, AB055368.1, BC008893.1, |
| | | | | | AL117435.1, AK027213.1, AK000614.1, AL162083.1, AL049464.1, AK026534.1, AJ242859.1, |
| | | | | | AL136892.1, AK000137.1, AK025524.1, AL137463.1, AF090943.1, AB048964.1, AK025906.1, |
| | | | | | BC008070.1, AB047801.1, AB055303.1, AB060887.1, AL359615.1, AK000618.1, AL137550.1, AF225424.1, AL359596.1, |
| | | | | | AL117583.1, AK026647.1, AL133080.1, AK026629.1, AL133075.1, AF125948.1, |
| | | | | | AF111847.1, AF146568.1, AL133113.1, BC007199.1, S61953.1, AK026045.1, AB060908.1, |
| | | | | | AL133557.1, AL136789.1, AB049758.1, AL122093.1, AL133606.1, BC008983.1, BC008382.1, |
| | | | | | AK026592.1, BC008417.1, AK026353.1, AB055366.1, AL050149.1, AL133016.1, AL442082.1, |
| | | | | | AL110225.1, BC008365.1, AL117394.1, AB051158.1, AL389982.1, AL117457.1, AK026504.1, |
| | | | | | AK025092.1, AL122098.1, AL050116.1, AK025772.1, AL080124.1, AL136799.1, BC003683.1, |
| | | | | | AK026542.1, AK000647.1, AB060863.1, AL110221.1, AL137527.1, AB063070.1, AF218014.1, |
| | | | | | AL049314.1, BC002733.1, AK000083.1, AL137538.1, BC008387.1, AL442072.1, BC006412.1, |
| | | | | | AL050393.1, AF078844.1, AF091084.1, AL136928.1, X82434.1, AF097996.1, AK025967.1, AK025391.1, |
| | | | | | AL080159.1, BC008899.1, BC001967.1, AL512754.1, AK026959.1, Z82022.1, AB063046.1, AL137459.1, |
| | | | | | AB063084.1, AB052200.1, U80742.1, AB056768.1, AB019565.1, AL122123.1, AF230496.1, AL137557.1, |
| | | | | | AK000445.1, AL136786.1, U42766.1, AL137648.1, AK025491.1, AL050277.1, AL117585.1, AL512689.1, |
| | | | | | AF219137.1, AF090903.1, AF125949.1, AK026593.1, AF260566.1, AL050108.1, AL133565.1, |
| | | | | | AL122121.1, AL049466.1, AB055361.1, BC006807.1, AB056421.1, AF090900.1, AK026452.1, |
| | | | | | AL583915.1, AL512719.1, AB047615.1, AL133640.1, AK026741.1, AK025484.1, AB055315.1, |
| | | | | | AL050024.1, BC002839.1, AL110196.1, AL122050.1, AJ012755.1, AL110197.1, S78214.1, AK026784.1, |
| | | | | | AL162006.1, BC007021.1, AL136768.1, AL512765.1, AL136586.1, AF090901.1, AL512718.1, |
| | | | | | AL080060.1, AB052191.1, AK026086.1, AB048953.1, AL512761.1, AK025339.1, AB063008.1, |
| | | | | | AK026651.1, AL359618.1, AF183393.1, AL512746.1, AF207829.1, AK026532.1, AL353940.1, |
| | | | | | AL133560.1, AK000718.1, AL390167.1, U91329.1, AK026865.1, AF106862.1, AF104032.1, AF061943.1, |
| | | | | | AK000652.1, AL122110.1, AL359941.1, AK027113.1, AB060912.1, Y16645.1, AL049938.1, |
| | | | | | AL133093.1, AL389978.1, AL512684.1, AK026583.1, AL049430.1, AB050510.1, AL049382.1, |
| | | | | | AL137271.1, BC004951.1, BC008280.1, AK026744.1, AK025958.1, AK025414.1, AK027204.1, |
| | | | | | BC008485.1, AB062938.1, AK026630.1, AL136843.1, AK025632.1, AL080127.1, AL162062.1, |
| | | | | | AK026927.1, AK000323.1, BC004556.1, AL080137.1, AL050138.1, AL137521.1, BC006195.1, AL122049.1, AB055374.1, |
| | | | | | AL049300.1. |
| HKB1E57 | 92 | 876571 | 1-1128 | 15-1142 | AL518848, BE795484, BE790580, BE793563, AI005330, AL530857, BE865465, BE740884, BG259765, |
| | | | | | BE559709, AW972157, BE793925, BF732476, AI523173, AI133648, BF132480, AA741065, BE266365, |
| | | | | | AW246779, AA483640, AI553793, AA889963, AW731821, AW376863, AI457636, AU159951, |
| | | | | | AI076501, BE865290, AW250974, BF683810, AI245539, AI160351, AA122216, N70566, AI123318, |
| | | | | | W04730, AI298575, AI094218, BF840014, AI298397, AA627412, AW474453, BF063304, AI304872, |
| | | | | | W80875, BE645309, AI829879, AA877594, AW514292, AA721451, AI032434, AA564388, AA723454, |
| | | | | | AW571641, AW591598, AW605095, AA404537, BF326544, H07869, F13805, AI055951, AA122217, |
| | | | | | AV693323, AA308813, AI474982, T08020, AI678622, AA284386, AW839757, AW189626, AL530858, |
| | | | | | BE393850, W80766, BE143803, AA706470, AA319710, AA480437, BE936534, BE166705, AW051083, |
| | | | | | AA121863, AI432644, AI927233, AI687607, AI924051, AI431307, AI623302, AI431316, AI431238, |
| | | | | | AI539800, BE897632, AI590043, AI289791, BE883591, BG167830, AI285417, AI866786, AI687588, |
| | | | | | AI537677, AI494201, AI872315, AI500659, AI866465, AI815232, AI801325, AI500523, AI538850, |
| | | | | | AI887775, AI582932, AI923989, AI284517, AI872423, AI440260, AI500706, AI445237, AI491776, |
| | | | | | AW151138, AI889189, AI521560, AI500662, AW151974, AI567971, AI804505, AI815239, AW172723, |
| | | | | | AI284509, AI582912, AI538885, AI440263, AI889168, AI866573, AI633493, AI434256, AI866469, |
| | | | | | AI434242, AI805769, AI866691, AI888661, AI500714, AI284513, AI888118, AI285439, AI859991, |
| | | | | | AI436429, AI355779, AI623736, AI889147, AI581033, AI371228, AW194509, AI491710, AI440252, |
| | | | | | AI926593, AI440238, AI860003, AI610557, AI242736, AW058275, AI828574, AI887499, AI539781, |
| | | | | | AI539707, AI702065, AI885949, AI285419, AW089557, AI559957, AI521571, AI469775, AI866581, |
| | | | | | AI866503, AW151132, AI539260, AI567953, AI815150, AI446495, AI431321, AI867068, AI932620, |
| | | | | | AI890907, AW074057, AL042729, AI889191, AI952433, AI225248, BE885490, AI358271, AI798359, |
| | | | | | AI282249, AI698352, BF812963, AI371229, BG252929, AI539771, BF811804, AL561170, AL042595, |
| | | | | | AW151979, AI284516, AI432666, AI289101, AW858522, BF814072, BF811802, AL039508, AW151136, |
| | | | | | AI866458, BG029667, AI371251, AI493559, AI866510, BG249858, BE826157, BG113493, AI866461, |
| | | | | | AI923046, BG110517, AI687944, BG176609, AL047611, AI955221, BG257535, AI889157, AL039390, |
| | | | | | BF795712, AI559976, AI690946, AI567947, AI436438, BG253986, AI648567, AL042787, AL134524, |
| | | | | | AI433157, AI362495, AI371243, BF796402, AI288076, AL515375, AL042853, AI469764, AV736134, |
| | | | | | AI432653, AI431323, BE886728, AL042655, AV736402, BF815930, AK023992.1, AK027449.1, |
| | | | | | BC001215.1, AF152097.1, AL355392.7, AL136763.1, AL133049.1, AL133053.1, AL136825.1, |
| | | | | | AL133607.1, AL133076.1, AL122101.1, AL049423.1, AL133084.1, AL133070.1, AL133655.1, |
| | | | | | AL136765.1, AL136781.1, AL110223.1, AB048910.1, AK026784.1, AL133074.1, BC008781.1, |
| | | | | | BC007294.1, AL133015.1, AL133608.1, AL136828.1, AK026927.1, AF002985.1, AL162008.1, |
| | | | | | AL117445.1, BC008983.1, AL157482.1, AL122049.1, BC004991.1, AF082324.1, AL133051.1, |
| | | | | | AB049849.1, AL136808.1, AF057300.1, AF057299.1, AB047623.1, AK026480.1, AK025860.1, |
| | | | | | AL049557.19, BC003108.1, AL512733.1, AX025484.1, AL512765.1, AC004213.1, AC006039.2, |
| | | | | | AK000225.1, BC000649.1, BC004314.1, AB047941.1, AL049300.1, BC000253.1, BC004530.1, |
| | | | | | AL080139.1, AK026912.1, AL389947.1, AL354864.16, AB047953.1, AL162062.1, AL137485.1, AL137254.1, AL353092.6, |
| | | | | | BC000009.1, AK000486.1, AC008755.6. |
| HKFBC53 | 93 | 1352286 | 1-2224 | 15-2238 | BF027339, BF689868, BE791172, BE273437, BE260092, BG031379, BE727402, BF339469, BF984194, |
| | | | | | AI760572, AI760520, BE294301, BE676312, AW297966, AI244284, AI422554, AA962223, AI971830, |
| | | | | | BF975689, BE252368, BE383741, AA644162, AW245081, AI598190, AI090193, AA495832, AI143992, |
| | | | | | AI361951, AI990481, AI990174, N50101, AI350501, AA994262, AI859137, AW003834, AI380542, |
| | | | | | AI086091, AI394639, AA976745, AA293019, BF027207, R90773, AA253139, AA495776, F23330, |
| | | | | | BF690095, N33565, AA417706, R88936, BF869114, AI351614, AI202144, N72164, BE408877, |
| | | | | | AA115762, AW237082, W00431, AW025153, BE159093, AI284384, AA610858, AI766469, AI685216, |
| | | | | | AI672360, BF718243, AA745682, AL119175, AI582214, AW274357, AW134904, BG033163, BE546341, |
| | | | | | AW268196, AI913519, AA082841, R36266, AW072885, AA114066, AA496881, AW474388, BF745906, AA133537, |
| | | | | | AI693690, AI000915, AA293473, AC005786.1, AC005787.1, AF218008.1. |
| HKGDL36 | 94 | 877489 | 1-1038 | 15-1052 | BF966686, BF969262, BE798423, BE383172, BG108317, BF438085, BF967072, BF724971, BF310167, |
| | | | | | BF437374, BF525713, BF725537, BE312863, BE327726, BF526596, BF983368, BF966496, BE392518, |
| | | | | | BE045542, AI261620, AI628667, AI955247, AI796185, AW024651, BF724972, AI365220, AI767645, |
| | | | | | BE551437, AW051507, AI199503, AI418919, BF724666, AI039610, AW162506, AI955309, BE673721, |
| | | | | | AW138191, AI969138, AW583447, AI373491, AI696987, AW583390, AI952012, AW341037, BF310234, |
| | | | | | AI758216, BF438130, AW013963, AI955147, BE66944.0, AI768473, D61105, BF592013, AI355910, |
| | | | | | AI969092, AI913491, AW027769, AI423438, AI968975, AI479582, AW090177, H41372, AI927970, |
| | | | | | AW300071, AI400855, AI348277, AW771649, AI672352, AI991536, AI421291, BF739771, AW103643, |
| | | | | | AA894790, BF197412, BF724667, BF197448, AW583609, AW000953, AW299323, AI498193, |
| | | | | | AAI99635, D59847, AV748923, AI560270, AI625846, AI493832, AW590037, AW955700, AI702136, |
| | | | | | AA877175, AW583672, AA757536, D59877, AA706516, AW393735, D60795, D80419, AI302316, |
| | | | | | AI248555, D80214, D80684, AI927667, AI627691, AA989221, BE464388, D59878, BE218723, |
| | | | | | BF346124, AI985164, AW000934, BF967708, AW001692, AI701771, D59848, D59725, AA873392, |
| | | | | | AA364835, BF431598, H92678, AW135417, AI589246, AW072965, AW163721, AI916619, BF752892, |
| | | | | | BE964512, AL515163, AW022102, AI783861, AL513839, AA600801, BE621073, BE544111, BF815196, |
| | | | | | BF910849, BE963809, BF814409, BE784387, BF840099, BE963918, BG170109, BE613727, BE880341, |
| | | | | | BF814360, AW005029, BF921092, AV712606, AV681927, BE967251, BE964621, AI866741, AW059713, |
| | | | | | BG108334, BE536377, BF929585, AI254754, BF764538, AA824513, AW083804, AI539462, BF129016, |
| | | | | | AI446605, AL513741, AA830821, BE966699, AI924035, AI445976, BE875966, AI242248, BE885353, |
| | | | | | BE538466, AI620093, AI537643, AI358042, BE880697, AI683255, AI591412, AI591081, W81248, |
| | | | | | AI536910, BE964962, AW834325, AI864827, BE048026, AI872159, BE061389, BE964767, AI591057, |
| | | | | | AW073868, AI863256, AI690449, BE907440, AI884574, F35927, BE878032, BE965121, N95566, |
| | | | | | AV743128, AV706465, AI445588, BE899377, AI934000, AI280670, AI583578, AI627714, AI500039, |
| | | | | | AV708075, BE900603, BF752858, AW265004, AI623682, BF341610, AW079032, AI925736, AI252077, |
| | | | | | AI590787, AW025533, AI267185, BG105895, BE964600, AL513789, F26535, AL048377, BE965527, |
| | | | | | BE967255, BE964799, AW946864, AL514167, AI627880, BE621140, AV710267, AI678302, AI926878, |
| | | | | | BE878028, AI633300, BF817402, BF753053, BE875407, BF752999, AI689614, AI624668, BE966390, |
| | | | | | AI811192, AI866002, F28295, BG260275, BE963286, BF753056, BC002851.1, AF181562.1, AF196971.1, |
| | | | | | AJ012582.1, BC003104.1, BC007248.1, BC001470.1, AF230402.1, BC002948.1, AF352728.1, U77594.1, |
| | | | | | AK000212.1, AB063077.1, BC003687.1, BC004314.1, AK026865.1, AK025491.1, BC001294.1, |
| | | | | | AB060908.1, AK025906.1, AL137557.1, AL136752.1, AK000598.1, AL121656.2, BC002816.1, |
| | | | | | BC002356.1, AJ010277.1, BC002397.1, BC004529.1, AL157464.1, BC000785.1, BC000725.1, X95876.1, |
| | | | | | AB060832.1, BC004324.1, AL080162.1, BC002777.1, AF022813.1, AK027113.1, BC004370.1, |
| | | | | | AB055374.1, AL137556.1, AK024601.1, AK026164.1, AL512705.1, AK026613.1, BC008417.1, |
| | | | | | AL512746.1, AL136780.1, AL136864.1, BC001969.1, BC004310.1, BC000235.1, AF028823.2, |
| | | | | | AF112208.1, AL136767.1, BC003602.1, BC005890.1, AL137665.1, BC004417.1, AL137547.1, |
| | | | | | AF218034.1, AB049629.1, AF239683.1, AL136799.1, BC008196.1, BC006251.1, AK026590.1, |
| | | | | | AL049347.1, AK026603.1, AL389978.1, AL049460.1, S77771.1, AL512719.1, BC004937.1, BC005678.1, |
| | | | | | BC001093.1, AF225424.1, AB063071.1, AB060214.1, AB047904.1, BC002557.1, Y16645.1, AB060893.1, |
| | | | | | BC001349.1, AL137459.1, BC004195.1, AL512718.1, BC001963.1, AF111847.1, AB060914.1, |
| | | | | | AL353935.1, AL136766.1, AK026600.1, BC002491.1, BC000778.1, AL096720.1, AL359622.1, |
| | | | | | AL049314.1, AB047941.1, AK025119.1, BC004333.1, AF205861.1, AL133568.1, AL136586.1, |
| | | | | | M92439.1, AL136790.1, AL117648.1, AL137657.1, AF069506.1, BC007207.1, AL133081.1, BC004202.1, |
| | | | | | BC005931.1, AB060839.1, AL080137.1, AB056768.1, M79462.1, AK025410.1, AL390167.1, |
| | | | | | AK026533.1, AF090934.1, BC003052.1, BC005151.1, BC000217.1, BC008488.1, AL162062.1, |
| | | | | | BC004131.1, AL136842.1, BC009294.1, AB019565.1, BC000348.1, AK024594.1, AF188698.1, |
| | | | | | AL122050.1, BC004530.1, AF132676.1, AB056427.1, BC006440.1, AF061836.1, BC000772.1, |
| | | | | | BC006458.1, AF217991.1, BC003410.1, AL389935.1, BC006133.1, AF348209.1, AL353625.5, |
| | | | | | BC002911.1, X66975.1, AK024570.1, AK000450.1, BC008070.1, AK024533.1, AB048888.1, |
| | | | | | AK000432.1, AL133645.1, BC004899.1, AL359596.1, BC002535.1, AK026741.1, BC004383.1, |
| | | | | | AF271781.1, AL117585.1, AB044547.1, AB063079.1, AK000310.1, AF036268.1, AB049758.1, |
| | | | | | AL080074.1, AL442082.1, U42766.1, BC004926.1, BC004960.1, BC005872.1, AL049339.1, AF358829.1, |
| | | | | | AK026086.1, BC003650.1, AB047897.1, BC002798.1, BC007674.1, AB055366.1, AB060929.1, AK025239.1, |
| | | | | | BC005854.1, BC002342.1, AL359623.1, AL110225.1, AL122118.1, AF321617.1, |
| | | | | | AC025226.4, AK026649.1, AF271350.1, AK026045.1, AK000652.1, AK000445.1, AL133062.1, |
| | | | | | BC002519.1, BC004297.1, BC006106.1, BC000094.1, AL136828.1, AL137648.1, BC006196.1, |
| | | | | | BC002343.1, BC006494.1, BC000316.1, AB060226.1, AL157483.1, AK027142.1, AK000323.1, |
| | | | | | AK025517.1, BC008025.1, AL353956.1, BC002476.1, AL050092.1, AL096751.1, U91329.1, AF081197.1, |
| | | | | | AF081195.1, AK025383.1, BC005002.1, AC006357.5, AL080060.1, BC001762.1, BC000386.1, |
| | | | | | BC005858.1, AB049849.1, BC002539.1, AL162008.1, AK024538.1, BC005007.1, BC002647.1, |
| | | | | | AB047887.1, AB047623.1, AB060873.1, BC004265.1, AK027081.1, BC001293.1, BC008485.1, |
| | | | | | BC001045.1, AK027164.1, AL136644.1, AL122098.1, AK000655.1, AK000421.1, S69510.1, AL137284.1. |
| HKISB57 | 95 | 625956 | 1-1478 | 15-1492 | BG253059, AI888563, AW083174, AI890983, BE677527, AI742994, AA581853, BE208188, AA496043, |
| | | | | | AI749573, AI433172, AA912116, AU152415, AU151244, AA526295, W72233, AI708515, AA029171, |
| | | | | | AI289783, AA147482, AW001857, BE744941, BF851250, W76470, AI148076, AI619715, W32695, |
| | | | | | AI973179, BF856405, AA086231, AI536682, AI244167, AW205328, AA112137, AI015550, AI159953, |
| | | | | | AA449234, AA449289, AI886087, R48602, AW974749, R48705, N57904, W73612, AA515533, |
| | | | | | AI095398, AA086322, AA554446, AA317019, BE019888, R07096, AA894669, AA112027, T96414, |
| | | | | | AA923651, T96497, AI581984, AI093238, AW084446, BE834394, T65129, AA100811, BF767404, |
| | | | | | AA652428, W32694, AW364698, BF371383, AW390788, AI903419, AI903380, AI903350, AA300051, |
| | | | | | AW886927, H55267, AA029067, AA588851, AA588463, BF931116, BE646329, AW514396, T65909, |
| | | | | | AW578218, AW800794, R07042, AA625855, AA663955, AA687595, AI581808, R76016, W22074, |
| | | | | | AA043407, AA436950, H39017, BF814527, AI824576, AI702073, AI698391, AW080090, AI633062, |
| | | | | | AI608936, BE786043, AI358213, AI306705, AW983832, BE963838, BG179993, AW051258, AI677796, |
| | | | | | AW051088, BF856017, AI932794, AI366900, AI352497, AI889189, AW983829, AI270183, AW163834, |
| | | | | | AL514731, AI434468, AI812015, AI249877, AI679672, AW118518, BF812960, AI284131, AW029611, |
| | | | | | AI468872, AI699011, AI927755, BF792961, BE966388, AI886753, AW827289, AI564719, AV743962, |
| | | | | | BG108406, AI567846, AV741327, AI573060, AI783504, BG112718, AI620284, AI866770, AW198075, |
| | | | | | BF032768, AW083778, AL514899, AI611738, AI280732, AI619502, AI680162, AI802542, AW081255, |
| | | | | | AI280607, AI499285, AI570807, AW004886, AI452560, AW026882, AW151136, AI923370, AI627988, |
| | | | | | BF812938, AL118781, BF970652, BE789764, AW104724, AI670009, AI863382, AI433157, BE543089, |
| | | | | | BF812961, AI452993, AI624548, AI659795, AW079572, AI860783, AI633125, BF812426, F27788, |
| | | | | | AW089179, AI673785, AI915291, AI354998, AW152182, AI537024, AI917252, BE967261, BF725599, |
| | | | | | AW080746, AL120853, AW129659, AW163554, AI537677, AI499890, AI612852, BF526020, AI174394, |
| | | | | | AW192461, AI613270, AW105620, AL119863, AI520809, AI923989, AL036673, AI571909, AI803778, |
| | | | | | AI653979, BG036846, AW192687, AV682249, AL514357, AW839006, AI274507, AI632408, AI288305, |
| | | | | | AI635067, BG180273, AI612913, AL119828, AV682212, AI590686, AI435268, AI432030, BE048071, AI500588, AI628217, |
| | | | | | BE047606, AI637748, AW238688, BG029829, AF064238.3, AJ010306.2, |
| | | | | | Y13492.2, Z49989.1, AF115564.1, AF115570.1, AF115567.1, AF115569.1, AF115568.1, AL122098.1, |
| | | | | | AL137533.1, AB056420.1, BC006195.1, BC005858.1, AK024524.1, AL133067.1, AK025092.1, |
| | | | | | BC001045.1, AL137550.1, AL080159.1, AK026462.1, AK024538.1, AL512733.1, AL050277.1, |
| | | | | | AL389939.1, S61953.1, AB056421.1, BC008893.1, AL137294.1, BC001963.1, AL389982.1, AF026816.2, |
| | | | | | AL136844.1, AB060852.1, BC008488.1, Y14314.1, AF260566.1, AL136805.1, AL049283.1, AL512684.1, |
| | | | | | AK025209.1, AK026593.1, X82434.1, AK026542.1, X72889.1, AL137560.1, AL137271.1, BC004951.1, |
| | | | | | AB060916.1, AK026532.1, AF183393.1, AL137478.1, AL137556.1, AL583915.1, AK025484.1, |
| | | | | | AF057300.1, AF057299.1, AK000652.1, AF348209.1, AL353625.5, AK026480.1, AF218014.1, |
| | | | | | AF225424.1, Z82022.1, AK027213.1, AK027164.1, AK027160.1, AF056191.1, BC003122.1, AF111112.1, |
| | | | | | AB048974.1, AB062938.1, AL050393.1, AK026534.1, AL122049.1, AL136915.1, AB055361.1, |
| | | | | | AK025632.1, AL122100.1, BC006525.1, AL110225.1, AL133568.1, BC004556.1, AL136892.1, |
| | | | | | BC008365.1, BC005678.1, AL080124.1, AK026408.1, AL162002.1, AL122110.1, AK026533.1, U39656.1, |
| | | | | | AL136893.1, AL050149.1, AK000418.1, AJ299431.1, AB047904.1, AL122093.1, AL050138.1, |
| | | | | | AL133560.1, AL137463.1, AL136749.1, BC006807.1, AL133557.1, AF262032.1, AB049758.1, |
| | | | | | AK000323.1, AF146568.1, AF162270.1, AL133113.1, AK025465.1, AL133072.1, AF091084.1, |
| | | | | | AK026583.1, AK026642.1, AL133640.1, AL359583.1, AK026744.1, AK025084.1, L30117.1, |
| | | | | | AK000083.1, AL133016.1, AK025708.1, AL353940.1, AL442082.1, U80742.1, AK000718.1, |
| | | | | | AL110280.1, AK026865.1, AL512750.1, AL162083.1, AF090934.1, AB048919.1, AL359620.1, |
| | | | | | AL050172.1, AL359618.1, BC004958.1, BC003682.1, AB046642.1, AL110221.1, BC006164.1, |
| | | | | | BC003684.1, AL512765.1, AL122121.1, AL137292.1, AF271350.1, AL137476.1, AK000391.1, |
| | | | | | BC008417.1, U58996.2, AB063084.1, AB056809.1, AF090900.1, AF242525.1, AL353956.1, AK026551.1, |
| | | | | | AL080148.1, AL117435.1, BC009033.1, AK024588.1, AL137557.1, AK026528.1, AK000432.1, |
| | | | | | BC006440.1, AK026947.1, AK027204.1, AB047801.1, AL117457.1, AL050116.1, AL136586.1, |
| | | | | | AL137480.1, AJ006417.1, AF061573.2, BC009341.1, AJ012755.1, AL512718.1, BC008070.1, |
| | | | | | AK027096.1, BC008899.1, AB056427.1, AF217987.1, AB048954.1, BC006494.1, AK026762.1, |
| | | | | | AK027182.1, AL512689.1, BC002733.1, AK027116.1, AL133075.1, AL133093.1, U78525.1, AL136787.1, |
| | | | | | BC008387.1, AF106862.1, AL080060.1, AL359941.1, AK000445.1, AB060826.1, BC005890.1, |
| | | | | | AB048953.1, AB050410.1, AB050510.1, AK026629.1, AK026045.1, AB050534.1, AF177336.1, |
| | | | | | AK025414.1, AL117460.1, AL136768.1, AF090903.1, AB052200.1, AK026927.1, AL117440.1, |
| | | | | | AY033593.1, AL133565.1, AL390167.1, L19437.2, AK026592.1, AK024601.1, AB063008.1, |
| | | | | | AB055374.1, AK025958.1, AJ242859.1, AF113222.1, BC009212.1, AK026452.1, AK025254.1, |
| | | | | | AB060214.1, AL110222.1, X53587.1, AK026959.1, AL162008.1, AF218031.1, BC005151.1, AB047615.1, |
| | | | | | BC004370.1, BC006103.1, AY034001.1, AK000486.1, AL133098.1, BC003548.1, AL050108.1, |
| | | | | | AL122118.1, AB062978.1, AL136789.1, AL049452.1, AK025391.1, BC008284.1, AK000647.1, AL136786.1. |
| HKMLM11 | 96 | 514788 | 1-940 | 15-954 | BG036576, AW376266, AW024675, AW965560, AA946948, BE834077, AA306783, AV738527, |
| | | | | | AV739697, BF241514, AV740463, AA758808, AA431001, AA910368, AA336054, AA335971, |
| | | | | | AW237846, AW827285, AI050666, AV755459, AI583054, AA764946, AA459982, AI811603, AI683160, |
| | | | | | AV734888, AV721366, AA648361, BE397723, BF970114, AI336575, BF306639, F37462, AI872164, |
| | | | | | AV694812, AW301344, AA830333, AI633321, AA678887, BE876047, AV706721, AA563942, AI245332, |
| | | | | | AA653346, BE740632, AI360195, BG177101, BG026443, AA437293, AV698290, AV706279, AI933756, |
| | | | | | AW102858, AW022121, AV656973, AW582932, AW238753, BG110384, AI345143, AI224463, |
| | | | | | AA836317, AL047398, AL041154, AI814841, AI621106, AI436429, AI364620, BE620084, AI343119, |
| | | | | | BG109221, AA100151, BF796402, AV760181, AI349012, AI627692, AA765010, BE885490, AW021373, |
| | | | | | BG033906, AV756956, AV764180, BE011885, AI559654, AC005551.1, AF217998.1, U91329.1, |
| | | | | | AK026600.1, AF197929.1, AL137555.1, AL133093.1, BC007797.1, AC004227.1, U68233.1, AK027114.1, |
| | | | | | AL359583.1, BC007534.1, AL137662.1, X86693.1, BC002688.1, BC004145.1, AF217991.1, AK025549.1, |
| | | | | | BC005094.1, BC008196.1, BC006147.1, BC007280.1, AL512746.1, AK000632.1, BC000007.1, AF111112.1, X53587.1, |
| | | | | | AL136816.1, BC006481.1, BC001128.1. |
| HKMMW74 | 97 | 581399 | 1-1780 | 15-1794 | AI524360, AA582463, AW970030, AW088049, BF845261, AV744082, BG166773, BF970654, |
| | | | | | AL137859.3, AC008784.6, AC022382.3, AC079844.3, AB038490.1, AC007917.15, AL158070.11, |
| | | | | | AL136231.12, AP000555.1, Z96074.4, AC006430.22, AP001695.1, AL354811.13, AC078958.30, |
| | | | | | D87675.1, AL138849.12, AC004019.20, AL391415.12, AC079950.23, AL117694.5, AC004935.1, |
| | | | | | AL121834.20, AL109921.21, AC008551.5, AF200465.1, AC008892.5, AC068799.14, AC006036.3, |
| | | | | | AC005725.1, AC015982.9, AL391262.3, AC004104.1, AC005079.6, AL132988.4, AP000692.1, |
| | | | | | AL590116.8, AL158144.15, AC005305.1, AC003049.1, AL022313.1, AC005520.2, AL353135.32, |
| | | | | | AL117377.18, AC025887.4, AC004468.1, AC083876.2, AC004774.1, AC004634.1, AL121900.26, |
| | | | | | AC034198.6, AC006460.3, AC005522.2, AC018828.3, AC067742.5, AC022383.3, AL161655.8, |
| | | | | | AL445686.14, AL031224.1, AP000128.1, AP000206.1, AL021154.1, AC009006.6, AF111167.2, AL589782.7, |
| | | | | | AL590785.7, AC021016.4, AL133387.8, AC006115.1, AC026439.3, AL034394.2. |
| HLDON23 | 98 | 636083 | 1-1248 | 15-1262 | AL529086, BE904120, BF337766, BF345489, AV706125, AI681123, BF002270, BF055322, BE856092, |
| | | | | | BE305227, BE219427, BF438375, BG149525, BF057786, BF590112, BF196165, AI741848, AI636347, |
| | | | | | AI973055, AI554720, AI871117, BE220195, AI745311, AW192924, AW340966, AA706712, AI091179, |
| | | | | | BF445900, BE645773, AI677802, AI889659, AI804323, AI688189, AW673266, AI298377, BE046787, |
| | | | | | AA535027, AW612722, AI830304, AW675294, AI139157, AW089901, AA410579, AW073842, |
| | | | | | AW316637, AA417232, AA416567, AI827376, AI372513, AA411560, AW001905, AI796719, |
| | | | | | AW673062, AI334363, AI085075, AI400032, AI452964, AA308319, AI888902, AI400560, T33187, |
| | | | | | AA877699, AI332395, AI372512, AA485507, AA017127, BG178589, R85136, AV705959, AL526358, |
| | | | | | BG056798, H94860, BF476221, AW016699, BF594282, R18537, AA988884, AI925753, AA993373, |
| | | | | | AW953175, W05059, AI263531, AA282629, F29641, R01402, AA625328, AA126985, AA354334, |
| | | | | | H58095, BE251679, AW662030, AI559961, AW337874, AA282410, AI014243, AI671403, R41526, |
| | | | | | AA485352, R43109, Z39066, BF925559, F04091, R01401, W04796, AV751453, BE871534, AA128150, |
| | | | | | AW375092, BF237662, BE155754, T25085, F17839, AW371533, N74669, AW058382, AW371557, BF063353, AL360256.1, |
| | | | | | AL117482.1. |
| HLDQR62 | 99 | 753742 | 1-2558 | 15-2572 | BE876197, AU133975, AW170131, AV723948, BG178057, AV652458, AW836234, AW608052, |
| | | | | | AA047046, BF104746, AA486037, BE395776, AW385580, AA488655, BE699041, AA932253, |
| | | | | | BG104619, BF671350, AA854943, AA418105, AA829456, AA243385, BE699051, BE936060, AI346694, |
| | | | | | AA418007, AA503398, AA053835, AW067836, AA878478, AI309218, BF820483, AA287990, W37960, |
| | | | | | AI401102, AI279485, W37900, AI423510, AA610711, AI050735, BF939011, BE699047, AA701403, |
| | | | | | W30974, AA017371, AW385388, AA911160, BF928600, H10281, W32542, AA133579, AV721259, |
| | | | | | H81907, BE908122, H11712, AA657490, H09562, R97956, BF810354, N68428, BF841567, AA018681, |
| | | | | | BF810349, AW838671, AW274397, BE699044, BF737894, H17436, AA133578, T03483, BF529092, |
| | | | | | BE699011, R93915, T84200, H10225, R97955, N91220, F09018, BE244933, BE697384, AW474873, |
| | | | | | Z43397, AA677745, F11358, AW838680, Z42508, H08994, H11779, R18755, AW067888, H86384, |
| | | | | | R20010, R44826, T78746, BE546845, BF768165, AA676360, Z41104, R12303, R61069, H80952, H01770, |
| | | | | | BF362799, AA857228, BE092626, AW361033, BE246721, R12953, F11514, AA298600, AA233314, |
| | | | | | H82000, Z45386, AA047038, AA988879, AA776420, R61792, BF925722, F02025, H37922, AA946813, |
| | | | | | AA058662, BE793798, AA298811, AW954042, AI024907, AA515707, AA579408, C02381, H38137, |
| | | | | | H80857, AA190438, AA059270, AW953912, W32541, AI253018, BF755527, AA252608, H39230, |
| | | | | | BF087406, BF841077, BE699066, F09175, AW608049, R36072, AW607934, AW242636, F02790, |
| | | | | | AA018740, BE092426, N47523, AW951415, BE872758, AA670010, BF793691, H86054, BE699208, |
| | | | | | AA017201, AA059226, BE857637, BG011131, AA233315, AW169463, BE935974, AA910836, |
| | | | | | BF756516, AA504287, AA489248, AW452612, BE858890, BE699076, AA953019, AA191764, |
| | | | | | BF930488, BE746764, AA552521, BF932022, BE080981, AW385586, BE092405, BE047109, |
| | | | | | AW838675, BE074538, AB046801.1, AC026749.5, AC026437.5, AC010491.3, AK001799.1, AF274753.1. |
| HLDQU79 | 100 | 740755 | 1-1474 | 15-1488 | BG256275, BE867624, BE907396, BE855521, BF034422, BF530803, AW959247, BE782005, AI126689, |
| | | | | | AL121446, AA757065, AW630129, BF768037, BE746763, AA206154, AA460401, AI276320, BF998689, |
| | | | | | AA295243, BE242732, BG035901, AL040350, BE242810, T86168, BF983867, W05088, AA347337, BG252443, |
| | | | | | AI133502, AF064093.1. |
| HLHAL68 | 101 | 684216 | 1-690 | 15-704 | AA359084, AC018797.4, AF224669.1, AF283321.1, AC007883.3, AC006038.2, AC034251.5, |
| | | | | | AC006345.4, AC008149.14, AL355392.7, AC006057.5, AC084864.2, AL354720.14, AC084865.2, AC006435.7. |
| HLIBD68 | 102 | 778073 | 1-1008 | 15-1022 | AL538046, BF975484, BG260893, BF062040, AW250850, AW954319, BG118275, AI633756, AI436560, |
| | | | | | BE646174, AA975057, AW302253, AI651397, AI825665, AI479926, AI635567, AI612806, AI640598, |
| | | | | | AI653427, AI248825, BF770160, AI333221, AA609320, AI916748, BF346659, AW001438, BF941021, |
| | | | | | AA397893, AI083783, AA399663, AA302889, AA484860, AI659648, BF222019, AI692578, R49550, |
| | | | | | AW016187, AA393712, AI673346, D80738, D81106, D81495, D81643, C15479, AI696498, C15522, |
| | | | | | R42643, AI761655, AA302888, D81794, D81487, D60344, AA302884, AA302883, BF813253, |
| | | | | | AA091824, BE743563, N49704, AI476597, D81533, N87760, BE396027, AA352126, AA281538, AA280240, AL133447.1. |
| HLICQ90 | 103 | 791828 | 1-1752 | 15-1766 | BF980403, BF726329, AI984197, AI192533, AI559494, AI378638, AA430026, AI061413, AW172705, |
| | | | | | BG165333, AI190915, AA430235, N62729, AI689890, AI360764, AA705532, H90333, H30177, T99745, |
| | | | | | H78217, T86019, H26993, T91236, AV645894, AA330598, N75483, H42449, BE766728, AW135351, |
| | | | | | AA976652, AA383620, BE220880, AI630095, BF381551, BF767606, BE087130, H42847, W05293, |
| | | | | | AA911697, AI659925, BE766726, H82733, T99746, BF889067, AW955970, AW971740, AI432644, |
| | | | | | AI431328, AI623302, AW968355, AI431347, AW972091, BE672759, AI432653, AI431230, AI432654, |
| | | | | | AI432655, AI431310, AI431312, AW081103, AI432677, AW968356, AI431323, AW972093, AW968729, |
| | | | | | AI431354, AI432661, BE672719, AI431307, AI431316, BE672732, AI431337, AI432650, BE672745, |
| | | | | | BE672748, AI431238, AI492519, AI432675, AI431350, AI431231, BE672767, AW972092, AI432651, |
| | | | | | AI432647, AI431243, AI431330, BF448552, BE672742, AI432662, AI431248, BE672644, AI432657, |
| | | | | | BE672774, AI432649, AW972090, AI791349, AI431257, AI432665, AI431247, AI431318, BE672738, |
| | | | | | BE672792, AI431235, AI431321, AI431315, AI431246, AI432643, BE672743, AL042519, BE672640, |
| | | | | | AW129223, AL042931, BE672622, BE672627, AI492510, AL042729, AL042832, AL047611, BE672754, BE672626, |
| | | | | | AL043295, AL357075.17, AF064854.1, AL133082.1. |
| HLTHR66 | 104 | 699812 | 1-2272 | 15-2286 | AW978874, BF507862, F033134, AL135232, AI673052, AW612437, AW880652, BF508030, |
| | | | | | AW118937, AI912990, AI651420, AI754531, AI285856, BF431306, AI760176, AI805972, BF511821, |
| | | | | | AI123209, AW001864, AI377932, AI141443, AI743946, H19020, BE857717, AW962968, AI221575, |
| | | | | | AA588506, BF475287, AA026012, AI249502, AI660528, AI949710, R68887, AV653095, AA026000, |
| | | | | | R77684, H19313, AI460280, AA829761, AA357748, BF511571, R77685, BE671786, AA084602, AI687732, AW889295, |
| | | | | | BE002919, AI812062, BF365444, C21025, AL136231.12, AF147395.1. |
| HLTIP94 | 105 | 1087335 | 1-1226 | 15-1240 | AA552985, AA314716, BE778519, BE894256, BE779796, AA228139, AI802948, AC005325.1. |
| HLWAA17 | 106 | 629552 | 1-983 | 15-997 | AL522002, BF305304, AL521608, BE732838, BE899550, BF344719, BG115015, BG109203, BF982386, |
| | | | | | BE410162, BE735023, BE901175, BG117962, BE281306, BG165427, BF793440, BE901577, BE872442, |
| | | | | | BF316646, BE409982, BF982251, BF970528, BE262711, BE299415, BF340859, BE386152, BF569778, |
| | | | | | BE281612, BF305644, BG251248, BF673757, BF183244, BE547252, AL521166, BF237978, BG249255, |
| | | | | | BE280374, BE301893, BG109330, BG164142, AL522550, BE018945, BG170896, AW732476, BE779176, |
| | | | | | BE018944, AL532064, AW250139, AA580387, H20615, BE741195, BE736037, BE272171, AI752100, |
| | | | | | BE870251, BE742694, BE883834, Z42865, W21970, AA873793, AW579408, BF753347, AA204913, |
| | | | | | AA206511, AA158660, BF971112, H66924, R25678, AA233944, BE743048, BE743976, BF304498, |
| | | | | | BE546682, BG112068, BF317329, BE278514, BF878947, BE744899, Z25248, BG248593, AW675147, |
| | | | | | T56764, AA368717, BE793472, AW956985, BE246887, BE298316, BE410692, BE707861, BF125052, |
| | | | | | BE388318, BF970723, BF675911, BE868990, BF031826, AA380216, AJ271671.1, BC007886.1, |
| | | | | | BC002563.1, AJ243649.1, BC003152.1, AF151829.1, AF132942.1, AJ243650.1, AC004832.3, AC005585.1. |
| HLYAC95 | 107 | 778075 | 1-298 | 15-312 | AV764526. |
| HMADK33 | 108 | 561941 | 1-850 | 15-864 | AL538273, AW139111, AA663592, AI582741, AL120259, H51572, AI122619, AI124509, BF366373, |
| | | | | | R86660, H50906, R86835, BF836623, BE884648, AF070673.1, AF030196.1, AL161976.1, BC005837.1. |
| HMAMI15 | 109 | 1352406 | 1-1244 | 15-1258 | BE790239, AI114496, BE047613, AI609021, AI478544, AI949665, R96283, AI205799, W39248, |
| | | | | | AI670908, T70976, AA070919, AI243978, AW854183, AI796472, BF883407, AW975683, AA654405, |
| | | | | | AI125888, AA730911, AA545731, BE222003, AA730927, C21177, AA721678, AI478489, AL137139.9, AL139035.27. |
| HMCFY13 | 110 | 635301 | 1-869 | 15-883 | BF026299, BE277091, AI343297, BF027218, BE390121, BE387283, AL514638, BE388858, AI364111, |
| | | | | | BE389119, AI668959, BE391988, AW206551, AA676232, BE870993, BF002101, BE277034, BE729557, |
| | | | | | BE276352, BF125430, BF896609, BE386944, AW207225, AA551687, BE718320, BF131318, AI990714, BE693868. |
| HMDAB56 | 111 | 560676 | 1-1451 | 15-1465 | AI075053, AW972336, AI199257, AA493693, N80663, AW879550, AL138455, AA633753, AA640410, |
| | | | | | AA640430, AW815064, BF820510, AA018283, AL037554, BG033220, BF822854, AV759329, |
| | | | | | BG033926, AL120343, BE062169, BF679557, AV757425, AI631355, AW129526, AV710289, BF868399, |
| | | | | | AW063373, BF437493, AW936354, AI094787, AW500029, BF915002, AA908411, AV760207, |
| | | | | | AV761925, AW975971, BF666395, BE858219, AV764035, AU137841, BF679274, BG002515, |
| | | | | | BF698704, BE064275, AA493136, AI700109, BE883107, BF699964, AI918465, AA507547, AI805123, |
| | | | | | AP002088.2, AC008014.5, AC009470.4, AC011450.4, AL133480.9, AL356244.12, AP000493.1, |
| | | | | | AC008521.5, AL353741.16, AC004638.1, AL139148.11, AC011475.6, AL158832.13, AC004634.1, |
| | | | | | AC005102.1, AL135749.3, AC010105.12, AC000088.2, AC019197.7, AL133214.12, AP000901.5., |
| | | | | | AC008891.7, AC021188.6, AL049776.3, AL117355.5, AC002128.1, AL450483.1, AC007774.1, |
| | | | | | AL080315.18, AC008622.5, AL135901.23, AP001692.1, Z84485.1, AC007097.4, Z84480.1, AC022415.5, |
| | | | | | AC008747.5, AC000082.4, AC020908.6, AF121897.2, Z98747.1, AC010422.7, Z84720.1, AL109921.21, |
| | | | | | AC090944.1, AC074338.1, AC007318.4, AL136219.17, AC004841.2, AC003109.1, U82668.1, |
| | | | | | AC003103.1, AC020977.5, AF057280.1, L44140.1, AC004774.1, AC011242.8, AC020913.6, |
| | | | | | AL354935.23, AC069080.12, AL389888.8, AC007036.3, AL136359.13, AC005746.1, AC006441.13, |
| | | | | | AL133453.3, AC084732.1, AL353194.13, AC004466.1, AC004253.1, AC025165.27, AL160175.5, |
| | | | | | AC005840.2, AP000251.1, AC007225.2, AL161779.32, AL033378.12, AL359397.3, AL022725.8, |
| | | | | | AL159977.10, AP001412.2, AF196779.1, AC025765.5, AC007388.3, AC016697.8, AC006023.2, |
| | | | | | AF334404.1, U52111.2, AC008896.5, AL121655.1, AP003117.2, AC009320.7, AC004087.1, |
| | | | | | AL121992.24, AL136304.10, AL138759.20, AL031228.1, AC006211.1, AL121752.13, AL157406.19, |
| | | | | | AC025418.23, AC007012.1, AC006548.20, AL354670.4. |
| HMEED18 | 112 | 560775 | 1-1355 | 15-1369 | BF967947, BF794640, BE744676, BE872383, BE261972, BF680443, BF967220, BE732377, AI417193, |
| | | | | | W95515, AW294641, BF306808, AI189166, BE856708, BE644954, AI949989, BF530795, AA628537, |
| | | | | | BE551422, BE747031, BE304795, BE735201, AI457735, BE870962, AI634510, BF131863, AI671536, |
| | | | | | BF242851, AI870629, AW514766, AI813311, AI862663, BE293244, AI768533, AI823596, AA129467, |
| | | | | | AI446582, AI435116, AI627345, AA972422, AI968606, AI088367, AI827354, BF439637, AI824877, |
| | | | | | BE220123, AV703921, AW236583, AI377591, AI040592, AA648774, AI095815, AW953613, D59730, |
| | | | | | D59523, AA029160, AW009152, AA054405, AI244209, AW023899, BE674038, BF059180, D59622, |
| | | | | | AA778356, AI470145, BF378975, AA970493, AI368877, D59801, AA129466, AI659586, AI344665, |
| | | | | | AI824866, AI803930, D59455, AA993837, D59633, R61441, AA704531, AW022576, AA484947, |
| | | | | | BF955158, D59447, AV725111, BE870487, AI082578, R35366, T74319, BF948389, D59583, D59781, |
| | | | | | R35909, AI365131, D59454, AW341984, BE467192, AI864239, D59649, D59777, H09254, T89104, |
| | | | | | AI128531, H23419, D59584, H09679, R23394, T77005, D59540, F13041, F10282, D80153, D80213, |
| | | | | | F10633, D59650, AA333625, BF855208, D59537, D59800, D59536, AI867775, AI702258, D80146, |
| | | | | | D59825, D59539, R25274, AA301260, D59438, H23420, D80341, D59769, D80323, AA827217, D59439, |
| | | | | | D59794, D59473, AA319561, R38088, R44178, R20566, D59692, F16283, D80260, R61396, D59749, |
| | | | | | AV726311, AA095729, D59772, AI088314, BF967226, AI383053, D59813, H22900, R14241, D59752, |
| | | | | | R40536, T34343, BF510049, F13475, D59782, AA346675, D80245, AI434889, Z43638, D59459, |
| | | | | | AW303981, D80381, BG054921, AW291373, D59812, AI418992, BF948033, AW516233, AI434666, |
| | | | | | BF837006, AW816352, AI356833, BF771676, AW340432, AA331587, AA332355, BF156021, AF353992.1, AK026257.1, |
| | | | | | BC008873.1, BC006150.1, AL512689.1. |
| HMEFT54 | 113 | 520307 | 1-582 | 15-596 | AI925461, AI187417, AA527170, W51933, AA534506, AI699870, AA430389, AW264729, AA284284, |
| | | | | | D20078, AI350867, AW131222, W48637, AA400891, AI458334, AI168826, AA400960, BF590627, |
| | | | | | AV719049, AV699669, AI557751, AW962245, AW975618, AA365173, Z21582, C14298, C14331, |
| | | | | | C15076, AV699550, AV724520, AW973541, AV718692, AW950117, D80064, AV719758, AV718489, |
| | | | | | AW949498, D59787, D59467, AA526218, AA701131, F13647, AW817409, AA434346, D80164, |
| | | | | | AV729929, AW964468, AI201668, D59889, D80195, AA507526, AV720791, AV718530, AI694178, |
| | | | | | D81030, BF382730, AV720203, AW960553, D50995, AV700889, BE148028, AU119190, R20046, |
| | | | | | BE001177, AW949645, D80196, BE748599, D51423, T41134, BF837744, AV718800, BF876179, |
| | | | | | D80212, C14227, BC002933.1, AK026989.1, AF254260.1, AL136917.1, BC008301.1, AF086205.1, |
| | | | | | AF254860.1, AC090939.1, AC005230.1, AF037338.1, AC004823.1, AC004922.2, AC020716.3, Z95116.1, |
| | | | | | AC025166.7, AL445184.11, AC009131.6, AC006581.16, AC010530.7, AP000172.1, AC003101.1, |
| | | | | | AP000057.1, AC005038.5, AP000125.1, BC005232.1, AC002407.1, AL031985.10, AC007308.13, |
| | | | | | AC002492.1, AC007021.3, AC012476.8, AP000688.1, Z98884.11, AC006241.1, AL355312.24, |
| | | | | | AL354932.26, AC004526.1, AC007387.3, AF283320.1, AC008543.7, AC034193.4, Z83851.17, |
| | | | | | AC005529.7, AC007193.1, AC018828.3, AC022383.3, AL158159.14, AC018808.4, AP001721.1, |
| | | | | | AC083873.3, AC004476.1, AL136365.9, AL096791.12, AC008009.4, AC005670.1, AC008524.6, |
| | | | | | AL031673.19, AL139317.5, AC005531.1, AC008397.7, AF215937.1, AC011811.42, U80017.1, |
| | | | | | AC006071.1, AL158828.14, AC008969.5, AL590002.7, U53331.1, AL354685.17, AL157877.11, |
| | | | | | AL442203.12, AL096701.14, AL160269.14, AC006312.8, AL512600.5, AP000030.1, AL445237.16, |
| | | | | | AC010271.6, AC010326.6, AC006571.12, AL034379.8, AC004685.1, AL023807.6, AC022415.5, |
| | | | | | AL121747.41, AL161669.5, AC000025.2, AL121886.22, AC018663.3, AC020983.7, AC010183.6, |
| | | | | | AC073366.3, AL359402.3, AC005015.2, AC005527.3, AC005823.1, AC026464.6, AL138878.10, AC005585.1, AC006480.3, |
| | | | | | AC010422.7, AC004832.3, AC004973.1, AC005039.1, AC004825.2. |
| HMEGF92 | 114 | 520304 | 1-615 | 15-629 | T65556, BF952979, F09666, AA995112, AA983746, AA983748, AP001972.4. |
| HMSDL37 | 115 | 973996 | 1-2483 | 15-2497 | BF358189, BF358186, BF358188, BF673854, AV762975, AA481760, AL042906, BE908602, AU154050, |
| | | | | | AU158859, AI310464, AA113159, AV718718, AW080062, AI952885, AL042905, BG029899, AA679794, |
| | | | | | BF813805, BE206133, AL048969, AI132963, AW401509, AV700988, AA113272, N49425, BF968610, |
| | | | | | AW975169, AA524604, AW157616, BE300645, AW008089, AV699423, AW976010, AV700654, |
| | | | | | BF679169, AI016704, N80210, AW151713, AU117926, AA427470, AW957502, AV760701, AI63 1119, |
| | | | | | N48230, BE895796, AW962035, AW979158, BF673743, AL534685, AA833875, AA833896, BF926318, |
| | | | | | BE061906, AA081138, AL044339, AW268329, AW960015, BG254652, AW600804, AU140392, |
| | | | | | BF820678, BF668559, AV764259, AA572968, BF736198, AV734543, BG222875, AW897556, BF892846, |
| | | | | | AC022001.3, AC018811.4, AC018494.6, AL353810.9, AC005553.1, AL139396.17, AL020995.14, |
| | | | | | AL163151.1, AL021918.1, AC022534.7, AL135903.12, AL161443.13, AC007912.6, AC018684.3, |
| | | | | | AC019052.7, AL163248.2, AJ400877.1, AC006313.1, AC022401.3, AC025165.27, AF274857.1, |
| | | | | | AL445186.4, AL137782.9, AL139322.13, AL355520.8, AC003065.1, AC004813.2, AE000659.1, |
| | | | | | AL139109.14, AC027670.4, AC021396.6, AC005033.1, AC007251.3, AC015723.8, AL392106.4, |
| | | | | | AC004073.1, AC007963.7, AC006544.19, AL353788.33, AL133500.3, AL512641.9, AC010376.5, |
| | | | | | AC073964.3, AC004650.1, AL157955.5, AL358372.11, AL359077.10, AL137918.4, AL035608.11, |
| | | | | | AL138783.6, AL135924.11, AP001189.4, AP002453.3, AL133373.5, AL391122.9, AL023876.2, |
| | | | | | AL163209.2, AC021093.16, AP001719.1, AC068643.27, AL121755.23, AC007068.17, AL359332.2, |
| | | | | | AL133241.3, AC007611.5, AL357060.31, AC078841.4, AL138880.14, AL159140.4, AL513264.8, |
| | | | | | AL138920.11, AC004021.1, Z92547.1, AC068102.4, AC089987.26, AC009289.8, AL163280.2, |
| | | | | | AC010282.5, AL157827.17, AJ006997.1, AC005066.1, AL163303.2, AC009122.8, AL035090.10, |
| | | | | | AL359205.15, AL133417.10, AC090497.2, AC007097.4, AC005280.3, AL359400.4, AC010591.8, |
| | | | | | AL354868.10, AP001718.1, AF131216.1, AC068312.4, AL109865.36, Z84480.1, AC009404.5, |
| | | | | | AC006543.7, AC007510.6, AL160162.11, AL354942.10, AC005862.1, AL136090.12, AC084882.2, |
| | | | | | AL353812.13, AC022740.4, AC008863.7, AC018797.4, AC006348.3, AL359644.10, AC008701.5, |
| | | | | | AC087427.2, AC074391.5, AL035407.15, AC010292.7, AL512310.3, AC020717.3, AC010885.8, |
| | | | | | AF235098.1, AL161629.10, AL035468.3, AC007447.6, AC007455.7, AC007385.3, AL390121.6, |
| | | | | | AC021351.4, AC009499.4, AC021849.5, AC010904.10, AL034410.8, AC010726.4, AC011701.22, |
| | | | | | AP001713.1, AL160281.17, AL357150.7, AL109854.10, AL035661.16, AL355530.6, AL138479.4, |
| | | | | | AC073125.5, Z95126.1, AC068139.5, AL390731.9, AP002006.5, AL161938.6, AC073150.7, |
| | | | | | AL117345.21, AC066593.4, AL391868.15, AC068993.14, AC010585.6, AF279660.2, AL161892.9, |
| | | | | | AL121895.26, AL022241.2, AL035697.19, AC002403.1, AC026882.5, AL021940.1, AL445495.5, |
| | | | | | AL049875.2, AC018653.29, Z93015.9, AL117693.5, AC010638.7, AP001981.5, AL390838.26, |
| | | | | | AC008962.8, AC004852.2, AP000751.4, AC020941.5, AL160397.17, AL158167.15, AF188030.3, |
| | | | | | AL121932.19, AL590239.7, AL356379.10, AL390039.10, AF205588.1, AC007938.1, AL031294.1, |
| | | | | | AP003438.2, AL050308.9, AF002223.1, AC006028.3, AC011246.6, AL137129.4, AL162455.14, |
| | | | | | AC080094.5, AC005183.2, AJ006345.1, AF106564.1, AC007739.2, AC010127.12, AL392044.7, |
| | | | | | AP000577.4, AL132987.4, AL135841.11, AL031286.1, AC066611.6, AC073532.18, AB026898.1, |
| | | | | | AF003627.2, AL162430.15, AL512359.2, AP001720.1, AL136520.3, AC073917.19, AC024367.6, |
| | | | | | AF224669.1, AL161804.4, AP003477.2, AL359763.9, AC025263.22, AL163301.2, AC004933.1, |
| | | | | | AL356108.12, AL359693.11, AC022407.6, AC022468.5, AL121900.26, Z82206.1, AC011497.6, |
| | | | | | AC034305.6, AL035671.5, AC008280.4, AL117337.25, AL022163.1, AP001731.1, AL158147.17, |
| | | | | | AL354750.12, AL359292.12, AC007717.8, AL132774.20, AL050305.9, AL118557.5, AL356421.10, |
| | | | | | AC019233.7, AL355615.12, AL034384.1, AC010422.7, AC013242.7, AL356125.13, AC005058.1, AC006288.1, AL161908.13, |
| | | | | | AC009479.4, AL360231.16. |
| HMSFI26 | 116 | 560229 | 1-1203 | 15-1217 | BF902399, W89152, BE391139, AW975663, AA767864, AW020255, AW021440, AI024622, AA730474, |
| | | | | | AA551532, AC069548.4, AC004906.3, AC004675.1, AC006965.3, AF088219.1, AL121574.19, |
| | | | | | AL139109.14, AC004813.2, AL162231.20, AC013734.4, AC012459.7, AL157955.5, AL391827.18, |
| | | | | | AC022407.6, AL034422.24, AC004216.1, AC011551.3, AL355336.15, Z83822.1, AC010252.3, |
| | | | | | AC008720.6, AL391122.9, AC000353.27, AC012377.5, AC011816.17, AC004408.1, AC007363.3, |
| | | | | | AC073101.7, AC010092.4, AC016396.5, AL117355.5, AC022201.4, AF235098.1, AL157372.18, |
| | | | | | AC007228.1, AL445237.16, AC008066.4, AL591770.1, AL162831.5, AP000355.1, AC026770.6, |
| | | | | | AL353588.25, AC006461.2, AC005840.2, AC005912.1, AC011456.2, AC009137.6, AL035079.14, |
| | | | | | AB042297.1, AL365400.19, AC003950.1, AC027126.4, Z98884.11, AL034369.1, AL031670.6, |
| | | | | | AC090955.2, AL157893.16, AC004685.1, AL133500.3, AC011497.6, AC018500.3, AL158206.8, |
| | | | | | AC019171.4, AC025168.7, AL034346.31, AC005736.1, AL133279.7, AL391724.7, AC002565.1, AP000284.1, |
| | | | | | AL080315.18, AL133410.31. |
| HMVBS81 | 117 | 639203 | 1-515 | 15-529 | AW080812, AW082817, AI951822, AW328562, BE138773, AI453744, AW246456, AW248692, |
| | | | | | AI953814, AA916922, AW166193, BE741575, AI189652, AI554578, BE207752, AW051430, AI143755, |
| | | | | | AW631158, AI378866, AA602780, AW166148, AI346750, AA402608, AI191618, AA643353, BE207747, |
| | | | | | AA703840, BF969135, AA503856, AI991172, AI150232, AI885695, BE312018, AA599791, BF940193, |
| | | | | | AI951334, AI192449, AI423588, AI089026, AI564055, AI160783, BE904552, BE675401, AA722619, |
| | | | | | AI333580, BE465600, AI147788, AI201929, N39330, AI806345, AA740539, AI359694, BF569026, |
| | | | | | BG111020, AW078736, W42999, AA915948, BG231541, AI453740, AA845228, AA128902, AI262427, |
| | | | | | BG111584, AW005011, AI191380, AA838219, N93880, AL529784, AI289245, AA975577, AA654241, |
| | | | | | BE270980, R17925, AA455946, AA858122, AL529713, AW070627, AW068993, AA480313, AW249124, |
| | | | | | AL530076, AL044257, AW381690, AW381728, AI073423, AW606063, AW381754, AW381773, |
| | | | | | W40373, H84216, AW381761, AW381723, AA032144, AW381716, AA639632, BE151932, AI284233, |
| | | | | | AW606042, AW606073, AL530075, AW381757, AW381711, BE151941, AW606072, H82810, |
| | | | | | AW328561, BE151934, AW606039, AI001133, D20808, F35123, AW606054, AW381758, F21453, |
| | | | | | BE909136, AI866123, T50401, AL526916, AA126629, AA282016, AW881457, AA308337, AA134834, |
| | | | | | AW364188, BG024191, AL529714, AI220753, AW601155, AI186566, H48575, BE908027, BE265069, |
| | | | | | AW469208, BF531105, AW182036, BE733058, AI202946, BE409400, AW250560, BE408657, |
| | | | | | AA774739, BE514152, AI902442, AA448447, BE792882, BE269512, AW951942, W45258, AW381677, |
| | | | | | AW885253, BF125578, AW885254, AW996198, H48844, AA402390, AI874330, AA032143, BF806199, |
| | | | | | BC001299.1, AF004876.1. |
| HMWDC28 | 118 | 460487 | 1-1132 | 15-1146 | BF511110, BF511098, BF507863, W52839, AW194969, AI199267, R68505, AI521938, R46033, W81166, |
| | | | | | BE000169, N47371, BE814496, W81165, AA086195, T64991, AI827849, AI816972, BF592053, |
| | | | | | AI797732. |
| HMWFT65 | 119 | 562063 | 1-1332 | 15-1346 | AW795416, AL121287, AL133445.4, Z85996.1, AL034548.25, Z98304.1, AC004953.1, AC068799.14, |
| | | | | | AC074121.16, AC004905.1, AL031431.8, AC003982.1, AC006487.8, AC005971.5, AL050335.32, AL009181.1, |
| | | | | | AC010271.6, AC006483.3. |
| HNEEE24 | 120 | 553558 | 1-1065 | 15-1079 | BE695767, H18634, R44271, AA022988, AA454219, AA454220, AA022950, AA429414, BF112103, |
| | | | | | AI183463, AW293235, AA584870, AI608821, AA564655, AI467968, H69890, Z95152.1, Z77249.1, |
| | | | | | AC004837.1, AL050335.32, AC009399.5, AF222686.1, AD000090.1, AC069539.4, AL139080.11, |
| | | | | | AL117338.15, AC005000.2, AP000427.3, AF039905.1, AC027319.5, AC004996.1, AC010328.4, |
| | | | | | AP000043.1, AP000111.1, AP001716.1, AP000424.3, AP000292.1, AC073321.4, AL133330.14, |
| | | | | | AL138743.5, AL050338.12, AL445423.13, AC068715.5, AC009003.7, AL450026.10, AC008493.4, AL355334.26, AC002300.1. |
| HNFFC43 | 121 | 753337 | 1-2089 | 15-2103 | AL048903, AI678076, BF527660, BE728354, BF317174, BE409263, AL530934, AL042801, BE729268, |
| | | | | | AL041340, AL530935, BE314879, AL042802, AW190561, BE313085, AI961484, AU154235, AU132769, |
| | | | | | AW027201, AI424792, AL524550, AA864499, AI432437, AA917094, AI934618, BE327057, BE383358, |
| | | | | | AI499074, AI344032, AI955647, BG253760, AA572961, AL048902, AW769938, BF509684, BE208853, |
| | | | | | AI342638, AI761488, AW732625, BE259667, AW974120, AI564533, W51904, AW961340, AI289643, |
| | | | | | AW971194, AW272378, BE297579, AI867205, AI796156, AA884306, BF002574, BF927739, BE885728, |
| | | | | | BF847648, AA456581, AA918441, AL524551, BF918942, AI766564, AW769937, AA493778, BF918936, |
| | | | | | AA304712, BF869582, AI168435, AU126961, AA298993, AA377693, AW769673, AI383037, H67555, |
| | | | | | AA322347, AA221032, AA713594, AI366484, AL039675, BE273248, F24965, AW797208, AA426295, |
| | | | | | AA322180, AA322590, BF919436, BF919454, BF919453, BF919451, AW178871, AI538564, BF752997, |
| | | | | | AI766348, AI701097, AW080090, AI367680, BF812961, AI619820, AI633125, AI828682, AI818240, |
| | | | | | AW152182, BF811804, AI796113, BF968679, BF669151, AI800648, AI500714, AI702073, AI884318, |
| | | | | | AI590043, AI868680, BG122005, AA740450, AI866469, AI971615, AI345415, AI934259, AI570056, |
| | | | | | AI433157, AL046466, AI819545, AI499570, AI698391, AI440448, AI915291, AI434731, AI445829, |
| | | | | | AI889189, AI638644, AI370623, AW188525, AW008226, AI699823, T69241, AI635634, AW148363, |
| | | | | | AI818350, AW089844, AI686817, AI376425, AI609375, AW051088, AI744268, AV736995, BF970652, |
| | | | | | AI569637, AW163834, AI270295, BE393784, AI471282, AW075381, AL043355, AI872423, AI801460, |
| | | | | | AI620864, W74529, AI421252, BF812938, AW081256, AI581362, AL513817, AW193911, AI670009, |
| | | | | | AI871697, AI537261, AI950729, AV709679, AI651840, AI281757, AI619502, AI591387, AW168822, |
| | | | | | AI473536, AW196720, AI345612, AI620056, AW834282, AL046595, AI677796, AI582932, N21402, |
| | | | | | AI922266, AI500061, AI474646, AI345416, AW079409, AA641818, AI621341, AI702068, AW081383, |
| | | | | | AI633198, BF814761, AI619662, T49776, AI565172, AI696714, AV747571, AI524179, BF766531, |
| | | | | | AI366900, AI521560, BF925771, AI927233, AI536638, AI479292, AI564719, AW027898, AI419826, |
| | | | | | AI432969, AI432030, AI799183, AW238688, AI932966, AI354643, AW168788, AI401697, AI357940, |
| | | | | | AI890214, AW078712, AI250627, AI636507, AI357273, AI634345, AI579901, AI352497, AV711455, |
| | | | | | AW104724, AL514079, AI783825, AI612852, AI956080, AI524654, AW104827, AI445025, AI815232, |
| | | | | | AW198090, AI684244, AL513761, AW078606, AW083374, AA830709, AW192652, AK001356.1, |
| | | | | | AF260728.1, AL137599.1, AK001651.1, BC008337.1, AB033000.1, AF351620.1, AF183393.1, |
| | | | | | AL389935.1, BC003573.1, AK026408.1, AL117587.1, BC008591.1, AL080159.1, BC006103.1, |
| | | | | | AK026462.1, AL137530.1, BC002466.1, AK026744.1, AK026593.1, BC003101.1, AL133075.1, |
| | | | | | AL137537.1, BC005825.1, AK000418.1, AL136850.1, AL023657.1, BC001199.1, AK026389.1, |
| | | | | | BC004945.1, L19437.2, BC004349.1, AL122104.1, AL050149.1, AL389982.1, BC006181.1, BC001964.1, |
| | | | | | AB047878.1, BC002631.1, AL050138.1, AB050410.1, AB050421.1, BC006345.1, AK000414.1, S76508.1, |
| | | | | | BC008686.1, AF115392.1, AL389947.1, AF232009.1, AL050155.1, AL050366.1, AB050510.1, |
| | | | | | AK026464.1, AF131821.1, AK027144.1, AL137533.1, BC003658.1, AF245044.1, AB052176.1, |
| | | | | | AL137711.1, AF274348.1, AF274347.1, AL137480.1, BC002733.1, AL359941.1, AL133637.1, X82434.1, |
| | | | | | BC008364.1, AL080146.1, BC004925.1, AB060897.1, BC005168.1, AB056421.1, Z82022.1, BC002970.1, |
| | | | | | BC003590.1, AL353940.1, BC001844.1, BC004264.1, AL049452.1, AL117416.1, BC008717.1, |
| | | | | | AF132730.1, AB050431.1, AF090903.1, D83032.1, AK026633.1, AK025889.1, AL162083.1, AL137271.1, |
| | | | | | AF218006.1, BC003569.1, AK027204.1, BC004336.1, AL583915.1, BC001655.1, BC006287.1, X99971.1, |
| | | | | | AL080148.1, AL110280.1, AL137476.1, AF205073.1, BC008063.1, AB060916.1, X59812.1, BC003684.1, |
| | | | | | AL137292.1, AL133077.1, BC006487.1, AK027096.1, BC001785.1, AK027173.1, BC006410.1, S77771.1, |
| | | | | | Y14314.1, AL133062.1, AL050143.1, AF044323.1, AF195092.1, AY033593.1, X15132.1, BC003410.1, |
| | | | | | BC005678.1, AL080154.1, AK000636.1, AB055331.1, AF339775.1, AK025435.1, BC008037.1, |
| | | | | | BC006458.1, AL122100.1, U73682.1, AL133619.1, M85164.1, AF230496.1, AL442083.1, AL137574.1, |
| | | | | | AF285167.1, BC005002.1, AF169154.1, AF038847.1, AL136615.1, AK027095.1, AL162003.1, |
| | | | | | BC003056.1, AL390184.1, BC007571.1, AK025350.1, AL110221.1, AK024747.1, AF262032.1, |
| | | | | | AF106862.1, AL136805.1, AL133665.1, AC006288.1, AF002672.1, AK026556.1, BC004181.1, |
| | | | | | AL133084.1, BC002365.1, AK024992.1, BC007206.1, BC000550.1, BC006091.1, AB048913.1, |
| | | | | | AK026746.1, AL110158.1, AF184965.1, X78627.1, AB047627.1, AL133623.1, BC009294.1, AY034001.1, |
| | | | | | AK026532.1, AL162002.1, AF026816.2, BC000199.1, BC008649.1, BC003591.1, AJ299431.1, Y13350.1, |
| | | | | | AK025099.1, BC004362.1, BC007460.1, AL512733.1, AB056420.1, BC008075.1, BC000090.1, |
| | | | | | AK025798.1, AF106697.1, AL136889.1, AL136893.1, AF199509.1, AF124728.1, U37359.1, AK025113.1, |
| | | | | | BC008078.1, BC004556.1, AF202636.1, D44497.1, AL133049.1, AF061573.2, AL157433.1, AL136784.1, |
| | | | | | BC008417.1, BC005070.1, AK026528.1, AL137478.1, X83544.1, AB060834.1, AL136844.1, |
| | | | | | AK000266.1, AL357195.1, AK027160.1, BC001305.1, AL137488.1, AL1 17435.1, X99226.1, BC004222.1, |
| | | | | | AL137550.1, AL161628.9, BC007021.1, Y14040.1, AF218000.1, AF141289.1, AK026613.1, AL117460.1, |
| | | | | | AF126488.1, AL080139.1, AK027365.1, AJ296345.1, AL137298.1, AL137716.1, Z35309..1, AL137627.1, |
| | | | | | AK000476.1, AK026550.1, AL359624.1, AL389939.1, AB048953.1, AL512684.1, BC000253.1, |
| | | | | | BC002370.1, BC002849.1, AF217987.1. |
| HNFIY77 | 122 | 634551 | 1-1198 | 15-1212 | BE778688, AA350580, AW451334, BE247283, BE242191, AI640492, AA078462, BE242141, |
| | | | | | AW003105, AA336368, R54889, AI910199, AI871293, AI267818, BF204188, AI858691, AC009412.6, |
| | | | | | AC072052.6, AL033517.1, AL161747.5, AC018897.4, AC005663.2, AL139095.15, AL135744.4, |
| | | | | | AC008072.3, AC005484.2, AL121897.32, AP000359.1, AC079141.7, AC020955.6. |
| HNFJF07 | 123 | 577013 | 1-602 | 15-616 | AA487061, AA486615, D78759, AC002091.1, AC004089.25, AC005015.2, AC039056.7, AC006329.5, |
| | | | | | AC005081.3, AC084693.2, U91323.1, AC002352.1, U82668.1, AL391259.15, AL109897.30. |
| HNGFR31 | 124 | 553552 | 1-522 | 15-536 | AL360297.12, AC005023.1, AC022124.5, AC008390.7, AC004836.2, AL136984.20, AC009558.14, |
| | | | | | AL117373.14, AP002350.3, AC006265.1, AC007057.3, AL139233.8, AC005079.6, AL359824.17, |
| | | | | | AP001541.4, AP000426.3, AJ239322.3. |
| HNGIJ31 | 125 | 519120 | 1-782 | 15-796 | AU147901, AA376128, BE562634, AC051619.7, AC020629.6, AL445531.10, AC009412.6, AC005052.2, |
| | | | | | AC079383.17, AL009172.1, AC016637.6, AK022380.1, AC004032.7, AP000555.1, AC009789.21, Z83851.17, |
| | | | | | AL359643.27, AC011005.7, AC008521.5, AC008635.6. |
| HNGJE50 | 126 | 561568 | 1-1023 | 15-1037 | |
| HNGND37 | 127 | 839224 | 1-827 | 15-841 | AA774312, BE670568, AI298480, BE702731, AI088824, AI149772, AA976633, AI870274, AA010606, |
| | | | | | AA010607, AW957725, AA010628, T33898, T75431, AI355909, AC005300.10, AC006946.20, AF307451.1. |
| HNGOI12 | 128 | 1041375 | 1-2114 | 15-2128 | AJ006345.1, AC005950.1, AC003675.1, AC001228.1. |
| HNHEU93 | 129 | 634851 | 1-734 | 15-748 | AW502688, AW410844, AI444575, AW504667, AW157128, AV758849, AW974923, AI038029, |
| | | | | | AA533011, AW021674, AW731858, AA618531, AA554289, AA557945, AA046906, AI065031, |
| | | | | | AW963552, AL121039, BG180320, AI702049, BG059139, AAI57876, BE080768, AI567676, AI745666, |
| | | | | | AV732057, AW953437, N72678, H53546, AL044966, BF942991, BF679568, BF724416, AI003068, |
| | | | | | BG059924, AA640305, BF439153, H47461, AA507623, AI921744, AA935827, AW265468, BF589864, |
| | | | | | AA831714, AW020682, AI572680, AA601336, AI791720, AI791408, BE049409, AI114755, AW962971, |
| | | | | | AI828721, AU158433, BE244547, AI251024, AV730440, AW148821, AW474825, AA631915, AI791659, |
| | | | | | AA595661, AA610644, AW023975, AA657392, AW029626, AA834891, AI884404, AV743067, AI890283, BF944618, |
| | | | | | AI609992, AI797998, AW970856, BG223384, BE677164, BE150831, AW836225, |
| | | | | | AA658890, BE882869, AI031759, BF913232, AA493245, N55076, AA019793, AA523718, AI888050, |
| | | | | | H48017, AW576388, AV763460, AW192930, AI076729, AW021847, BF431825, AA652675, AI708565, |
| | | | | | AA315052, AI734076, AI281622, AI064968, AI538404, BF950367, AL138262, AA632355, BE676988, |
| | | | | | AA527633, AI052366, AI445699, BF849260, AI634466, AW960129, AL523272, AA411337, AI640905, |
| | | | | | AV729090, AI312267, AI570067, AV728973, AW675677, AI701898, BE676910, BF973510, AI889614, |
| | | | | | BG250794, AI571094, AW239465, BF725844, R92703, BE391183, AW028376, AA578711, AL590005.6, |
| | | | | | AC055740.17, AC090950.1, AL161757.4, AL391375.11, AL158063.12, AC022542.4, AP002898.1, |
| | | | | | AL161779.32, AL109804.41, AL157700.13, AL136123.19, AL359397.3, AL359273.11, AC007597.3, |
| | | | | | AP001781.4, AL121932.19, AL109847.5, AL109825.23, AL163209.2, AL390838.26, AC011740.7, |
| | | | | | AL138880.14, AL137918.4, AL139109.14, AL031229.2, AL035427.17, AL354937.12, AC005303.1, |
| | | | | | AC006249.1, AC006487.8, AP001713.1, AF334404.1, AC002312.1, AC018653.29, AL138499.4, |
| | | | | | AP000486.5, AC072061.8, AC005181.1, AL137818.3, AC011816.17, AL162430.15, AL158167.15, |
| | | | | | AL035400.13, AP000263.1, AL109758.2, AC005844.7, AL139396.17, AC025165.27, AP000080.1, |
| | | | | | AL354696.11, AC008651.7, AL354861.11, AL157915.3, AC010585.6, AC007256.5, AL513548.8, |
| | | | | | AC005779.1, AC007912.6, AL360227.17, AC008280.4, AC012150.16, AL109627.18, AC025436.2, |
| | | | | | AC008498.3, AF205588.1, Z95327.1, AL355305.9, AC068319.4, AL136418.4, AL139054.1, |
| | | | | | AL357075.17, AL022578.1, AP003548.2, AL132778.6, AB026898.1, AL132709.5, AL121989.12, |
| | | | | | AC005972.1, AL163301.2, AC002302.1, AL137129.4, AC034191.5, AC002550.1, AC007097.4, |
| | | | | | AL139021.6, AC006079.1, AL139095.15, AC011247.10, AL138755.13, AL021808.1, AC073964.3, |
| | | | | | AL121594.6, AL137782.9, AC016950.8, AL133328.13, AL137128.4, AC022367.34, AL138920.11, |
| | | | | | AC025207.5, AL357150.7, AC008536.6, AC005291.1, AC005754.1, AL049712.12, AL354816.5, |
| | | | | | AL513342.7, AL390039.10, AC002990.1, AF111167.2, AB020868.1, AL022069.1, AL355343.18, |
| | | | | | AL160411.25, AC005036.1, AC018719.4, AL139389.16, AC005228.1, AC002996.1, AL049835.3, |
| | | | | | AC090509.1, AC010000.5, AC090005.1, AL161936.15, AC020558.4, AL583856.6, AP002392.3, |
| | | | | | AL031643.1, AE000661.1, AC016608.5, AL162853.17, AL031659.9, AC005079.6, AC009953.4, |
| | | | | | AL121865.7, AL109854.10, AC002395.1, AL391601.6, AC073125.5, AL161892.9, AL133373.5, |
| | | | | | AC019184.3, AC009137.6, Z84483.1, AC002381.1, AC017099.11, AL162426.20, AL136234.12, |
| | | | | | AC009955.4, Z99716.4, AL117337.25, AL138743.5, AC011005.7, AC007543.4, AC004847.3, |
| | | | | | AC008901.5, AC009961.11, AL135783.6, AF229163.1, Z84480.1, AL122057.4, AL035455.30, |
| | | | | | AC016644.7, AJ400879.1, AL590387.7, AL158828.14, AC089985.14, AC069548.4, AC016831.1, |
| | | | | | AC009481.4, AC027129.5, AL022165.1, AL162503.12, AL022067.1, AC016705.4, AC002524.1, |
| | | | | | AL137140.12, AL109865.36, AC010583.5, Z98036.1, AC008518.3, AC008155.9, AL079295.1, |
| | | | | | AL033527.26, AC007277.2, AC007363.3, AL162231.20, AC013751.6, AL163218.2, AC068724.7, |
| | | | | | AE000658.1, AC006543.7, AP001646.4, AL451075.15, AC020601.10, AC012157.20, AC006581.16, |
| | | | | | AL360232.24, AP002534.1, AL132986.4, AC000353.27, AC007308.13, AP001727.1, AC008268.3, |
| | | | | | AL049646.19, AC006461.2, AL356118.15, AL445483.13, AC007345.5, AL442167.1, AC007956.5, AC006544.19, AC008569.6. |
| HNHFM14 | 130 | 664507 | 1-283 | 15-297 | AC020552.4. |
| HNHNB29 | 131 | 895462 | 1-1880 | 15-1894 | AI049955, AA904211, AI921765, AU146342, R98218, BF725178, BF337320, AA515728, AL524675, |
| | | | | | BF772474, BG057207, BE675681, BE063437, BF804385, AI962030, R74433, BF724699, AV656063, |
| | | | | | AI499954, AI653776, AI523074, AI362442, AU118374, AW023302, AW957372, BE150793, AV763026, |
| | | | | | AV763058, BE281645, AW410354, AL038842, AW963444, AW403829, AA503298, AI709307, |
| | | | | | AW023111, AA825827, AV756491, AU158454, BF877926, AA713705, BG236484, AI735609, |
| | | | | | AW082104, AW780190, AV760014, AI254779, AA558404, AV719392, AA502532, AI14704, |
| | | | | | AA833875, AA833896, AA832145, AW957600, AA644090, BE072475, AW575605, AV703785, |
| | | | | | AW503420, AW973992, AI802087, BE301610, AW302017, AV738383, AW237905, AI859438, |
| | | | | | BF760573, AW962611, AV733437, BF944736, AV647070, AW513789, BG110818, AA581247, |
| | | | | | AI687343, BF854308, AW970958, AW615560, AI755057, AU157093, AI821987, BG222875, AA714110, |
| | | | | | AI732869, AA811741, AW849714, AL079734, AI889995, AA452887, AW978041, AV740009, |
| | | | | | AV764259, AA084609, H63660, AI587349, AW965008, AW190484, BE677244, AW501542, AW236219, |
| | | | | | BF217723, AA056248, AW843204, AV695478, AA633875, AW978591, AW192373, AW957154, |
| | | | | | AA604831, AW303872, AI141130, BF977305, AA297776, AI160786, AU151428, AU150634, |
| | | | | | AW083934, AA613624, AW051819, AI961983, BE968477, AW510513, AI417469, AC084881.19, |
| | | | | | Y10196.1, AL357515.26, AC005736.1, AL139396.17, AL356415.26, AC006241.1, AC006121.1, |
| | | | | | AL590763.1, AL022316.2, AL096677.21, AC016597.4, AF053356.1, AC002996.1, AL158040.13, |
| | | | | | AC012320.6, AC013434.8, AL109843.25, AC009194.8, AL356020.3, AC002425.1, AL133448.4, |
| | | | | | AC020916.7, AC005081.3, AL161731.20, AC078846.2, Z83819.1, AC011247.10, AL139317.5, |
| | | | | | AL022323.7, U95090.1, AC007225.2, AC083884.6, D86995.1, AC020913.6, AL356915.19, AL050349.27, |
| | | | | | AC023425.20, AC034242.5, AP001705.1, AC008946.6, Z95331.2, AP002008.5, Z98752.16, AC005920.1, |
| | | | | | AL157838.24, AL135839.15, Z93023.1, AC002045.1, AC005522.2, AC010419.5, AC016655.6, |
| | | | | | AC008616.6, AP001718.1, AL161669.5, AL035684.25, AP001752.1, AC002369.1, U95739.1, |
| | | | | | AC026794.4, AC015982.9, AL121586.31, AC009087.4, AC026202.6, AC008733.7, AL133477.16, |
| | | | | | AC005015.2, AL023575.1, AC007685.2, AC008397.7, AC018644.6, AL137061.12, AP001922.4, |
| | | | | | AC011442.5, AC006430.22, AC008766.4, AL132639.4, AC018821.4, AC006334.3, AC002492.1, |
| | | | | | AL157372.18, AC002073.1, AP000501.1, AC011465.4, AC022404.7, AC018639.8, AL135783.6, |
| | | | | | AL358434.16, AL031295.1, AL353807.18, AL157791.4, Z99716.4, Z83844.5, AP001709.1, AL031311.1, |
| | | | | | AC006040.3, AC067941.7, AC009032.7, AC007404.4, AL022326.1, AC018523.9, AC008755.6, |
| | | | | | AC008622.5, AC009996.7, AC008403.6, AC000353.27, AP001728.1, AP002007.4, AP000152.1, |
| | | | | | AC011287.4, AL021026.1, AC090950.1, AL049643.12, AL392106.4, AP001711.1, AC006028.3, |
| | | | | | AC008745.6, Z83822.1, AL136040.5, AC025280.4, AC010150.3, AB001523.1 AL159191.4, |
| | | | | | AC078957.16, AC020906.6, AL096701.14, AL138920.11, AC010271.6, AC022116.5, AL162426.20, |
| | | | | | AC004685.1, AC025159.28, AL139353.3, AF139813.1, AC007462.2, AC008904.6, AC013355.7, |
| | | | | | AL390241.19, AC022217.5, AC009165.6, AC004491.1, AP001670.1, AC007546.5, AL121899.37, |
| | | | | | AL162584.9, AB000882.1, AL121652.2, AC004000.1, AL139099.2, AC034251.5, AL136300.22, |
| | | | | | AC022425.6, AL031843.2, AL163032.3, AL162503.12, AC011472.7, AC009365.9, AL049757.14, |
| | | | | | AP001753.1, AC007249.5, AL354864.16, AC005006.2, AL117381.32, AC072052.6, AC027644.9, |
| | | | | | AC011508.4, AC074344.5, AL365475.1, AC002375.1, AF104455.1, AC000134.14, AC004840.3, |
| | | | | | AL139186.16, AL139809.16, AC007383.4, AP002851.2, AL118497.9, AL137078.20, AL022159.1, |
| | | | | | AC003025.1, AC005014.1, AC011479.6, AC007220.4, AC007242.3, AC084865.2, AL109759.4, |
| | | | | | AC012099.4, AL035604.15, AC005088.2, AC005666.1, AC006013.3, AC006205.7, AC084732.1, |
| | | | | | Z98044.13, AL137853.12, AL118502.38, AL390211.1, AL078461.38, AC008264.10, Z83826.12, |
| | | | | | AF124523.1, AC004975.2, AL133153.3, AL158214.33, AD000671.1, AF312915.1, AF279660.2, |
| | | | | | Z94044.1, AL021546.1, AC009269.6, AC010742.4, AF196779.1, AL031228.1, AC004099.1, AC008962.8, |
| | | | | | AC008626.5, AC011452.6, AL354735.14, AL354928.9, AC002314.1, AL449264.18, AL118506.27, |
| | | | | | AC021016.4, U80017.1, AC004477.1, AC008738.6, AC003085.1, AC004230.1, AJ295844.1, AC007114.7, |
| | | | | | AL109801.13, AC010378.6, AF200465.1, AJ300188.1, AC004832.3, AC005057.2, AC020915.6, |
| | | | | | Z97054.1, AC007664.12, AC009220.10, U91326.1, AL031433.4, AP001727.1, AC004757.1, AL109798.19, AC008074.3, |
| | | | | | AC003962.1, AC005228.1, AL133551.13. |
| HNHOD46 | 132 | 843488 | 1-1341 | 15-1355 | AV700498, BG164166, AV700988, AV700545, AL037632, AV762783, BG260565, AV714931, |
| | | | | | AV760723, AF074667, BF792326, AF034176, BE796439, AW962035, AW976010, AA524604, |
| | | | | | AV760360, BE541237, AU118837, AV719941, BF678427, AL138265, AW188427, AV733710, |
| | | | | | AL048626, AU117926, BE909125, AV764490, AU119532, BE067011, AL534817, AV699709, |
| | | | | | AV686853, AV722030, BE393367, BE538259, AA708751, AI732911, BF346320, AW970915, AA526787, |
| | | | | | AW131249, AU147226, AV763174, AV760497, BF805173, BF968141, AV762900, AV759711, |
| | | | | | AV759356, AV760364, BF307044, AV762902, BF679169, AV759686, AV762779, AW963982, |
| | | | | | AL042906, AV759684, AV762001, AV759683, AL135377, AV734543, AW408643, AU155227, |
| | | | | | AV759046, AA601355, BF913258, BE273856, AL044340, AA081138, AI952885, AA584482, AV734401, |
| | | | | | AL042905, AV722075, AV737621, BF666736, AA211734, AW080062, AV762002, AV761309, |
| | | | | | AI791227, AW961160, AV763305, AI038990, AV759172, AW102955, AA708108, BF381650, BF828714, |
| | | | | | AI685198, AI679294, BE066950, AV763952, AA831913, AI679871, AU145521, AI204309, AW151713, |
| | | | | | AW069670, AA481760, BF892846, AW130036, AV763135, AU140392, AA284247, AW102811, |
| | | | | | AA722372, AW008212, AU158859, AA640277, U51704, AU155168, BG258140, AW088689, AU155048, |
| | | | | | AA577824, BE387734, BE867712, AL119123, AW079809, AA601326, BF968610, AA515829, |
| | | | | | AC008440.8, AC011531.7, AC002302.1, AC027319.5, AC005484.2, AC005972.1, AC010469.7, |
| | | | | | AL109743.4, AC005077.5, AL035398.19, AC020916.7, AC022211.5, AC002301.1, AC018808.4, |
| | | | | | AP001711.1, AC008745.6, AC000052.16, AL035587.5, AC008720.6, AC007421.12, AC003101.1, |
| | | | | | AC034193.4, AC025593.5, AC006511.5, AF045555.1, AC007374.6, AL096814.26, AC005081.3, |
| | | | | | AL445685.17, AJ400877.1, AC004985.2, AC020558.4, AC009516.19, AC008443.8, AL031447.4, |
| | | | | | AC006028.3, AL121992.24, AC011465.4, AC008655.6, AC008616.6, AL135928.6, AL513550.9, |
| | | | | | AL031295.1, AL050335.32, AL049780.4, AC005052.2, AL390060.14, AC011005.7, AP001717.1, |
| | | | | | AB023049.1, AC007000.2, U82668.1, AC005840.2, AC006530.4, AF111168.2, AC018809.4, |
| | | | | | AC002477.1, AC011443.6, AC018751.30, AC008622.5, AC023058.17, L78833.1, AC007956.5, Z85986.1, |
| | | | | | AC072052.6, AL137067.7, AC018635.6, AC002059.3, AC004824.3, AC026172.3, AC018506.4, |
| | | | | | AP000116.1, AL135927.14, AC007227.3, AL445248.7, AL590763.1, AC005914.1, AP001727.1, |
| | | | | | AL158207.15, AC010320.9, AP000557.2, AL050318.13, AL139809.16, AC008764.7, AC004882.2, |
| | | | | | AC007731.14, AJ312686.1, AC008969.5, AC004965.2, AC005037.2, AC000353.27, AC027130.5, |
| | | | | | AC087590.1, AL513008.14, AC005520.2, AC005088.2, AL133244.1, AC008551.5, AL109976.23, |
| | | | | | AC011461.4, AL132639.4, AC005089.2, AC010492.7, AC009244.24, AC006930.1, AC007318.4, |
| | | | | | AC005098.2, AC005399.19, AC005529.7, AC004859.2, AL031584.1, AL160471.5, AL391139.19, |
| | | | | | AF111169.2, AL133448.4, AL451125.7, AP001670.1, AC011890.4, AC005231.2, AF030453.1, |
| | | | | | AC010527.5, AL034420.16, AC009247.12, AC010328.4, AC073657.5, AC006120.1, AL117692.5, |
| | | | | | AP000512.1, AL161452.19, AC022382.3, AL445435.11, AC005722.1, AC005632.2, AL162426.20, |
| | | | | | AL138721.16, AL163636.6, AL049766.14, AL137792.11, AL391827.18, AC004815.2, AL135901.23, |
| | | | | | AC020983.7, AC021036.5, AL162724.16, AL590762.1, AC011500.7, AC005736.1, AL022312.7, |
| | | | | | AP003357.2, AL158830.17, AC004089.25, AC006538.1, AP000212.1, AC008760.6, AL450226.1, |
| | | | | | AL163249.2, AC009002.5, AL121658.2, AF200465.1, AC025438.5, AC091118.2, AC008736.6, |
| | | | | | AL121601.13, AC004583.1, AC019205.4, AC010326.6, AC007676.19, AC018638.5, AC008755.6, |
| | | | | | AF001549.1, AC003109.1, AC009194.8, AL021578.4, AF064861.1, AC011247.10, AL354808.24, |
| | | | | | AP001718.1, AL355480.22, AC005015.2, AL079335.29, AC002299.1, AL035086.12, AC005368.1, |
| | | | | | AL357515.26, AF168787.1, AC074270.25, Z95152.1, AC002470.17, AP001752.1, AC005070.1, |
| | | | | | AC005332.1, AC005619.1, AC010458.5, AF196779.1, AC006285.11, AC010422.7, AC010463.6, |
| | | | | | AC004813.2, AC024561.4, AC007097.4, AC005280.3, AL096701.14, AC002985.1, AC007957.36, |
| | | | | | AL034379.8, AC004257.1, AL033529.25, AL359092.14, Z93023.1, AP001725.1, AL357560.11, |
| | | | | | AC022261.8, AL031681.16, AC025166.7, AC007999.12, AC005874.3, AF134471.1, AC016025.12, |
| | | | | | AC006254.10, AC004148.1, U95742.1, AC026464.6, AC011462.4, AC005821.1, AC003110.1, |
| | | | | | AC009756.9, AC011442.5, U78027.1, AC007619.22, AC010605.4, AL117344.12, AL121975.9, |
| | | | | | AL136300.22, AC006337.4, AL157838.24, AL158040.13, AC006970.6, AC007488.15, AC000026.3, |
| | | | | | AC008687.4, AC018720.5, Z84487.2, AL445222.9, AL132855.4, AC006480.3, AL031286.1, AC004906.3, AF196971.1, |
| | | | | | Z83843.1, AC003043.1, |
| HNTBI26 | 133 | 1310821 | 1-1368 | 15-1382 | AL528533, AL520935, AL521290, AL515806, AL520965, BE293492, AL520936, AL515807, AW972854, |
| | | | | | AV753139, BG178370, BF968317, AL520966, BE780476, BE305183, AI678037, AW293248, AL521291, |
| | | | | | AI269883, BF978348, AA894746, AI493776, AA778869, AI424848, AA525497, BF307374, AA622403, |
| | | | | | BG109953, N21347, AI095265, BF792489, AL519236, AA564674, BE249905, AI268502, AA995849, |
| | | | | | AA894745, AI249680, AW087844, AI300762, N72839, AI244187, AI089147, AI368934, AI740804, |
| | | | | | AI339842, AW516709, BF315359, AI335796, AW192649, AW801578, N28008, AI095231, BF977145, |
| | | | | | BF977663, BF765528, BE778762, BE875935, AI951011, BF669511, BG033337, AW393151, AL519237, |
| | | | | | AW819092, AW393138, BE868896, AV691113, BE875559, AV693124, BF976999, BF690855, AI127890, |
| | | | | | BE293585, AW984556, BF994881, AW090182, W76593, AA362394, AI906642, BE741647, T57136, |
| | | | | | AW753803, BF813621, AA533658, BF882501, AI638644, AI370623, AI698391, AA806720, T49776, |
| | | | | | AW008226, AI568293, AI332957, BE393784, AI590043, AI954721, AW128834, AI364167, AI419826, |
| | | | | | AW166870, AI884318, AI685005, AI473799, AI699823, AI440239, AI956080, AI393038, AI889189, |
| | | | | | AI621341, BG119543, AW166583, AW105296, AI580451, AI634345, BE966496, AI619820, AI570807, |
| | | | | | AW834282, AI499570, AI500113, AI620864, AI684369, AI633125, AW983832, AW103928, BF752997, |
| | | | | | BF727091, BF761618, AI254731, AW087934, AI802542, BE964556, AI927233, AI538564, AI270706, |
| | | | | | AW148882, AI915291, AW152182, N21402, AL046466, AA019328, BF811804, AI678446, AI473536, |
| | | | | | BF669151, AA102339, AW130362, AI653402, AI869765, AI270183, AI613038, BE965129, BG122005, |
| | | | | | AI950729, AI540821, AI700358, AI266652, AI701097, AW004606, AW198090, AW262552, AI934011, |
| | | | | | AI282669, AI349482, AI612913, AW084873, AI125015, BE963426, AI695857, AI636588, AI610446, |
| | | | | | AI572096, AI689157, AW075671, BF812960, BF996654, AI799183, AI687127, AI866419, AI824688, |
| | | | | | AI866040, AI824576, BE895003, AI683563, AW029489, AI540350, AI499890, BE963355, AI951950, |
| | | | | | BF724420, BG251076, AI421149, AI567513, AI866469, AI932966, AW129659, AI474146, AI298321, |
| | | | | | BE275487, AI816306, BE961919, AI539260, AW243451, AL080011, AA878142, AI567769, AV720998, |
| | | | | | AI524626, AI096481, AI470717, BF814527, AW102794, BE963310, AI478723, AI800341, AW089726, |
| | | | | | AI912434, AI648509, AI499963, AI673363, AF086351.1, AL117587.1, AL050366.1, BC008591.1, |
| | | | | | AB056106.1, X78627.1, X99971.1, BC004945.1, BC005825.1, AL080159.1, BC001199.1, BC003573.1, |
| | | | | | AL080148.1, AL080146.1, AX027095.1, AL136752.1, AC004942.1, AB047627.1, X68560.1, BC004416.1, |
| | | | | | AL133619.1, BC006181.1, AL133084.1, AF044323.1, BC004373.1, AK027052.1, AK026408.1, |
| | | | | | AL133653.1, AL133559.1, AF126488.1, BC008063.1, AL136850.1, BC001236.1, BC002373.1, Z82022.1, |
| | | | | | BC005123.1, AL139099.2, AL162066.1, AK025350.1, AL110280.1, AB056420.1, BC006345.1, |
| | | | | | AB050431.1, BC002349.1, Y14314.1, AK026210.1, AL137682.1, AC006288.1, AF115392.1, |
| | | | | | AK026182.1, AL133062.1, AL162729.8, BC008708.1, AK026746.1, AL357195.1, AL050155.1, |
| | | | | | BC002849.1, AB047878.1, AK000484.1, AJ299431.1, L25851.2, AC0106706.6, BC004349.1, AL050149.1, |
| | | | | | AL137478.1, |
| HNTBL27 | 134 | 545534 | 1-777 | 15-791 | AW169270, BF475369, AL524823, BE903984, AL530691, BE536833, BG230736, BE881512, BF033804, |
| | | | | | AA716162, AW183635, AI188277, AI141766, AI624087, AW173452, AI129419, AI683124, BE903838, |
| | | | | | AI828817, AI308087, BE544869, BF061917, AW291854, BE880241, AW471490, AW615124, |
| | | | | | AA701470, BF447518, AW025680, BF094269, AW449210, AA315210, BG251005, AW504333, |
| | | | | | AI239598, BE697836, BE742666, AI284846, AI355748, BE899398, BG027544, BF352604, AW376334, AW376337, |
| | | | | | AW752527, AW194025, AI890712, AI565340, BC006846.1. |
| HNTCE26 | 135 | 1160395 | 1-2149 | 15-2163 | BG252201, AV726464, AL529709, BE894106, AV726994, BF970560, BF132059, BF977798, AI703275, |
| | | | | | AW512938, BG164577, AL529708, AI767521, AI823746, BE220262, AA583438, AI143608, AW468337, |
| | | | | | AI949854, AV727138, AI620344, AI209187, AI630993, BG007081, AI004986, AI565892, AV715169, |
| | | | | | AI367983, BF056815, AW394003, R70620, BG007658, AAI52183, BF381743, AA565300, AA088574, |
| | | | | | AA931697, AA995899, AI025252, AA297479, T84083, AW138535, H71679, Z45535, AA297478, |
| | | | | | AI865989, AA367654, AA150060, AA044326, AW338484, D29436, R24591, AI005551, H00983, |
| | | | | | H39751, AI669105, T83438, BF091777, AW138127, R21165, BF083909, BE934286, R76620, AA971307, |
| | | | | | AA745052, AW945769, AI554153, T84151, BE550213, H01724, AW051517, AW373316, AW373313, |
| | | | | | T89390, BF083903, BE541509, AA180271, AI263504, AF303588.1, AF140242.1, AL133390.7, |
| | | | | | AF056032.1. |
| HNTNI01 | 136 | 1352285 | 1-2073 | 15-2087 | AA447485, AA196688, M86015, AI750365, R13985, BF356780, N28763, AC005028.1. |
| HODDF13 | 137 | 684307 | 1-816 | 15-830 | AC011245.8. |
| HODDN92 | 138 | 422913 | 1-1925 | 15-1939 | BG116781, BG110501, BE150456, AI742087, AA453725, AI917507, AW769479, AI860142, BE326465, |
| | | | | | AI459289, AI860141, AW963123, BE646467, AA868553, AW872412, AW971193, AW277065, |
| | | | | | AI921333, BF576826, AI024689, BE466760, AI354470, AI005467, AW103830, BE045272, AI827987, |
| | | | | | AA442638, BF109829, AA813604, N28268, AA442648, AA563934, N63406, AA833517, AA663108, |
| | | | | | AA437299, AA632986, AA436880, N58885, AA812876, AA447794, AA442379, N58892, AW020895, |
| | | | | | AA522837, AA600372, AA229448, T78981, AA663178, AV693238, AI187977, AV696576, AI472712, |
| | | | | | AA229164, T85178, AW270324, AV683374, R64648, AA333708, AA703066, AW961515, BE093710, |
| | | | | | T78927, R64655, BF802058, R95914, T84294, AA551512, AA460220, AI916737, R31132, AA359583, |
| | | | | | AI217018, N56349, AI191725, BE835233, BE835385, T84796, AV741009, BE835410, AI084517, |
| | | | | | N83238, AW362842, AA247541, R31089, T91125, AA493776, BE818350, BE818352, AI253986, |
| | | | | | R31247, AW303285, N95696, BE708493, AA678297, AI003856, BE818343, N95562, AW024721, |
| | | | | | AA862707, N95587, AA401399, AA399957, AW511080, AL157879.7, AL021368.1, AL009030.15, AL049987.1, AL133255.13, |
| | | | | | AL390738.4. |
| HOFMQ33 | 139 | 1184465 | 1-2396 | 15-2410 | AL528504, AU121718, AI820674, T94707, AJ224741.1, Y13341.1, AC079145.3, AJ001047.1. |
| HOFOC73 | 140 | 931871 | 1-1477 | 15-1491 | BF195687, AI762843, BF435173, AW167715, BE675436, AI829951, BF195590, AW517368, AI831464, |
| | | | | | BF110813, BF939079, AW573230, BE747230, AI760936, BF348602, AA418800, AI870845, AI420441, |
| | | | | | AI377190, BF196297, N32270, AI813507, AI313119, AI472198, AI340272, AA502942, AI363372, |
| | | | | | AI806717, AI479956, AA861188, AI073435, AI128897, AI799480, N35138, AA832426, AW753935, |
| | | | | | AA421515, AW362239, AA258517, AI907351, AA789084, BF924856, H42825, F35882, BF814541, |
| | | | | | AW409775, AW265004, AA830821, AW089179, AL133741, AA835966, BG029053, BE781369, |
| | | | | | AI696969, AI565172, AW089006, BE965169, BF527012, AA807088, BE048071, AI567637, AW088899, |
| | | | | | AI571868, BF725863, BF970263, AI244380, AL119791, BG058039, AW020419, BE964497, AW999906, |
| | | | | | BE785868, AI400725, AL046463, AI874166, AI922577, AI874151, AW081034, AI620093, AI282903, |
| | | | | | AI280661, AW193203, AA603709, AI570966, BG260144, BE061389, AI537617, AI919345, BG027628, |
| | | | | | AW130863, BF915537, AW834355, BF815196, AI648567, BE963918, BF915208, BE072233, AI952302, AI805638, |
| | | | | | AI366549, AI636719, AI539153, BE964767, AW085786, BE538466, BF904180, BE172499, |
| | | | | | BE963286, AL036638, AI857760, AA568405, AI611743, AI689420, AW083804, AI696626, AI633477, |
| | | | | | AV757067, AI589993, AI365256, T99953, BG105895, AL038505, BF814449, AW022682, BE393551, |
| | | | | | AA464646, AI963062, BF817746, AI886055, AI472536, AI677797, AW999599, AF009923.1, |
| | | | | | AL109840.24, AC010102.3, BC008142.1, AF136273.1, AF032906.1, AF136275.1, AL389978.1, |
| | | | | | BC004874.1, AK024538.1, AK025383.1, AK000137.1, AB063079.1, AL359600.1, BC004265.1, |
| | | | | | AK026624.1, BC001349.1, AF262032.1, AB063074.1, AF188698.1, BC007355.1, AK000421.1, |
| | | | | | AF069506.1, BC009253.1, BC008382.1, BC004908.1, AL359620.1, AK027868.1, BC007456.1, J05032.1, |
| | | | | | AF090886.1, AL137292.1, BC002454.1, AB063008.1, BC001045.1, AL133016.1, AF078844.1, |
| | | | | | BC004529.1, BC007255.1, BC008488.1, AF125949.1, BC000556.1, BC008893.1, AL080060.1, |
| | | | | | AL049382.1, BC007534.1, AL389935.1, AB019565.1, BC005007.1, AK025708.1, AL162006.1, U42031.1, |
| | | | | | AL096751.1, BC007389.1, AL136692.1, AL050277.1, AL512719.1, AF067420.1, BC005678.1, |
| | | | | | AK024588.1, BC003650.1, AK024601.1, AL122111.1, AB048975.1, AK000647.1, BC003548.1, |
| | | | | | AL137521.1, U91329.1, AL137665.1, AL117432.1, AF271350.1, AL133104.1, AL110196.1, AK000445.1, |
| | | | | | AF218014.1, BC006164.1, AK026522.1, AK026626.1, AL133081.1, AK025958.1, AF217987.1, |
| | | | | | AB048974.1, BC000316.1, AK027164.1, AL117457.1, AB062978.1, AL137300.1, AB056768.1, |
| | | | | | U77594.1, U39656.1, BC004370.1, AB049848.1, AK000652.1, AL512754.1, AB056427.1, AB060211.1, |
| | | | | | BC008785.1, BC003682.1, BC008417.1, AK000753.1, BC008282.1, AL133014.1, BC006201.1, |
| | | | | | BC006412.1, S76508.1, AF081197.1, AF081195.1, BC003687.1, AF239683.1, AF348209.1, AL353625.5, |
| | | | | | AL117648.1, AL137429.1, AK026533.1, AK026504.1, BC006508.1, AL512761.1, AF305835.1, |
| | | | | | AB049758.1, AF217991.1, AL122121.1, BC006133.1, BC005835.1, AF091084.1, AF162270.1, |
| | | | | | AF159141.1, AK026642.1, AB060905.1, AB056421.1, AK024974.1, AK027081.1, M92439.1, |
| | | | | | AL390167.1, AL080086.1, AL080074.1, BC000550.1, BC002647.1, AB063070.1, AK000432.1, |
| | | | | | BC003602.1, AB050510.1, BC007391.1, BC008673.1, AK026526.1, AB060852.1, AF303581.1, |
| | | | | | AF178432.1, AL136586.1, AL389939.1, AI006417.1, AK026353.1, AB047615.1, AB047897.1, |
| | | | | | BC008040.1, BC008280.1, AK025573.1, AF219137.1, AL110221.1, BC007998.1, AL442072.1, |
| | | | | | AL137527.1, AL050393.1, AK000450.1, BC000348.1, AK026591.1, AL136790.1, AC006451.5, |
| | | | | | AF012536.1, AL049460.1, BC007280.1, AF218031.1, AL133645.1, AK025375.1, AK025541.1, |
| | | | | | AB063084.1, AK026452.1, U00686.1, AF040751.1, S77771.1, BC008025.1, AL080137.1, AL049465.1, |
| | | | | | BC000785.1, AK024546.1, AF000145.1, AL137537.1, BC004533.1, AK027116.1, BC003052.1, |
| | | | | | AK024524.1, BC006210.1, BC005858.1, AK026086.1, AB047887.1, AB060837.1, AK027161.1, |
| | | | | | AK026647.1, AK026947.1, AB060929.1, BC008485.1, AL122098.1, AL080158.1, AB056809.1, S69510.1, |
| | | | | | BC004244.1, BC007346.1, AL359618.1, X65873.1, S78214.1, BC006195.1, AK026600.1, BC008455.1, |
| | | | | | AL080124.1, AL137463.1, S61953.1, BC008780.1, BC007326.1, AL122049.1, AL137526.1, AL136767.1, |
| | | | | | BC009403.1, AK000391.1, AB048964.1, AK025391.1, AK026528.1, AF245044.1, AK026597.1, |
| | | | | | AL122050.1, BC008899.1, AK026855.1, BC001967.1, AK026164.1, AF225424.1, AB047941.1, X69819.1, |
| | | | | | AK026959.1, AL117583.1, AL136844.1, AL133098.1, AK027182.1, AL512746.1, AK026746.1, BC000090.1, AB047801.1, |
| | | | | | AK025431.1, AL133557.1, AL117649.1. |
| HOQBJ82 | 141 | 1352356 | 1-3516 | 15-3530 | BE904978, BE383830, BE890564, BE729647, BE732309, BE789481, BE886173, BE733387, BE386405, |
| | | | | | BG258301, BE383286, BF125887, BE777790, BE280391, BE515074, AI459129, BE281548, BE644930, |
| | | | | | AI660728, BE894488, AW749978, AW169336, AW370341, AA719364, AW452738, BG256682, |
| | | | | | BF439379, AI361918, AW188152, AI690424, AI810025, AA281766, BE890960, AI150426, AI587146, |
| | | | | | AA630686, AI160979, AI741787, AA634292, AW264224, AA824631, BE207252, AW900280, AI689370, |
| | | | | | AA233695, BF125572, AA351589, AA769227, AI351341, AW029513, R41719, AI985709, AA634567, |
| | | | | | AW269038, AA351643, AW674550, R36553, H23984, H22704, AI819095, AA984407, AA355743, |
| | | | | | AW408651, AA973659, AI538888, T58501, AW661810, AA649086, AI933293, AI673569, BG057154, |
| | | | | | AI364341, R32827, AA973736, AW273585, AI497846, BF755875, BF927524, AW615711, AA356192, |
| | | | | | BF963119, BE501436, AA937403, R17171, AA353188, AA922835, AA026761, T99539, R27062, |
| | | | | | AA280121, H63038, R32930, AI537859, AI796641, BF927128, AI250269, D81030, AA693444, R27063, |
| | | | | | AV723591, R06448, AW375956, N56014, AA126901, AI276126, AI963082, BG222601, AW964936, |
| | | | | | BF345885, BF448000, BG002228, AA806733, AW802995, BF346206, AW410405, BF307973, BF755869, T58551, AA905213, |
| | | | | | BF346212, AJ305226.1, AJ305227.1, AL136564.1, AL035681.13. |
| HOSBY40 | 142 | 589431 | 1-1131 | 15-1145 | BE465874, BE465890, AW418562, AW814995, AA721114, AC002543.1. |
| HOSDJ25 | 143 | 854234 | 1-2200 | 15-2214 | AL521533, BF966564, BG109192, BE621548, BG259805, BF666690, BF667661, BF185318, BF666019, |
| | | | | | BE621125, AI433432, AW963800, BE883279, BF028488, BF667980, BF196902, BF111775, BF667265, |
| | | | | | BF664922, BF966437, BF667218, AI277896, BF028500, AI401346, BF696865, BF698781, BG169528, |
| | | | | | BF696312, AW338135, AI280253, AA873621, AI435513, BE552077, BF699387, BF055949, BF697521, |
| | | | | | BE542555, AI277959, AA121788, AI961880, AW969937, BF478121, AW338124, AA528626, |
| | | | | | AW367010, R76478, AA101422, T62844, AI918990, BE167397, W72961, AA876737, R28131, |
| | | | | | BE176581, AA375127, BF332407, AI365181, W73131, T62693, W21429, N92911, BF570557, AI077290, |
| | | | | | AA127501, R66340, AI926197, C00153, AA813575, R28517, AI580500, AI222072, AI033269, |
| | | | | | AA758476, W86851, AV661704, AV725920, AV728997, AV704234, AV726624, AV655280, AV729378, |
| | | | | | AV708992, AV727787, AV709407, AV654908, AV660608, AV652001, AV656903, AV707541, |
| | | | | | AV706854, AV702117, AV726738, AV728733, AV708834, AV687035, AV697196, AV708704, |
| | | | | | AV659322, AV656478, AV698545, AV709314, AV708381, AV660728, AV691080, AV651955, |
| | | | | | AV703169, AV728518, AW952409, AV709660, AV729220, AV696866, AV726816, AV695545, |
| | | | | | AV656283, AV708025, AV707933, AV684604, AV708980, AV692691, AV701914, AV705159, |
| | | | | | AV702516, AV693523, AV726103, AV727029, AV725826, AV725134, AV705280, AV702994, |
| | | | | | AV683272, AV697288, AV652156, AV728670, AV708723, AV729263, AV707510, AV699089, |
| | | | | | AV658863, AV701560, AV727776, AV698609, AV696106, AV706744, AV708438, AW951263, |
| | | | | | AV689111, AV728157, AV708109, AV692345, AV704553, AV683443, AV708893, AV659536, |
| | | | | | AV706219, AV658275, AV705693, AW960720, AV686064, AV705632, AV706721, AV701067, |
| | | | | | AV709604, AV704955, AV701707, AV707753, AV706089, AV704269, AV703495, AV702021, |
| | | | | | AV706677, AW960326, AV709869, AV656256, AV687909, AW954031, AV702832, AV708622, |
| | | | | | AV729259, AV726784, AV702833, AV707296, AV707767, AW958647, AV654896, AV645906, |
| | | | | | AV728806, AV652617, AV703599, AV727990, AV701580, AV708004, AV727003, AV703970, |
| | | | | | AV727526, AV727799, AV728471, AV703472, AV702147, AV686060, AV726156, AV649758, |
| | | | | | AV706342, AV702266, AV729189, AW953965, AV696931, AV698429, AV692972, AV685688, |
| | | | | | AV689800, AV693005, AV709390, AW953787, AW952414, AV722222, AV645936, AW955653, |
| | | | | | AV706185, AV684075, AW951618, AV658332, AV703168, AV648263, AV705384, AV707024, |
| | | | | | AV727807, AW952410, AV707792, AV726259, AW955723, AV706279, AW954439, AV647659, AV725617, AV698583, |
| | | | | | BC005700.1, AL137163.1, Z83826.12, AF086333.1, AF217994.1, Y08991.1. |
| HPEAD79 | 144 | 520202 | 1-799 | 15-813 | AC004590.1, AC069275.3, AL117382.28, AC002094.1, AP002852.3, AC009955.4, AC055740.17, |
| | | | | | AC011470.5, AC004965.2, AF109907.1, AC078846.2, AL109804.41, AC008745.6, AL121653.2, |
| | | | | | AC018832.4, AC018738.4, AC009502.4, AL136137.15, AC016543.6, AL121579.4, AL161670.4, |
| | | | | | AL353679.18, AL096701.14, AC025097.41, AC011449.6, AC006345.4, AC007637.9, AC003029.2, |
| | | | | | AL050341.18, AL353135.32, AC008403.6, AL365499.19, AC008764.7, AC023472.4, AC006449.19, |
| | | | | | AL513008.14, AC012306.11, AC005632.2, AC005041.2, AJ011930.1, AL163300.2, AL034405.16, |
| | | | | | AL109865.36, AC074121.16, AC090051.8, AC004962.1, AL096814.26, AC007666.12, AL161911.17, AF053356.1, |
| | | | | | AL109897.30. |
| HPIBO15 | 145 | 1310868 | 1-1725 | 15-1739 | AI056404, AI802391, AW270724, AI750249, N41425, N47678, AI188511, AI376981, AA029314, |
| | | | | | AW452123, BE466507, N39755, AI937190, AA063620, AA693737, AI139466, AA701241, AI250789, |
| | | | | | AI672263, AI198257, BF055537, AI199035, AA677064, W69895, AA040154, BF196981, W73711, |
| | | | | | AA029867, W69841, BF222273, AW900121, AW022270, W69574, AI373227, AI200161, AA701858, |
| | | | | | AV690112, AW044223, W69662, AI052153, AA872860, H29417, H29324, N26312, AI283749, AA036704, AI383659, |
| | | | | | AA332627, N47677, AI424682, BE089934, AA329748, AW952484. |
| HPJBI33 | 146 | 685699 | 1-1663 | 15-1677 | AI679782, BE796439, AV763892, BE387734, AW303196, AW301350, AW274349, AL046409, |
| | | | | | AI204304, AU148742, AL048142, F36273, BF475381, BE156019, AL041690, BE872393, N94311, |
| | | | | | BG236735, AA599480, AW630298, AW473163, AI754955, BF683672, AI281881, AW276827, AI341548, |
| | | | | | BF806176, AW467362, BF805094, BF940837, AV762050, BE350475, AA631507, AV652936, |
| | | | | | AW963497, BF965007, AV681599, BE042649, AV762139, AW080939, AW276435, AI291268, |
| | | | | | AI291124, AW339568, AU154961, AA426277, AI133164, AW088616, AI951863, AW873530, BF816072, |
| | | | | | AL038785, AW148792, AW338086, BE869857, AW408717, BE042475, AI580652, AA525190, |
| | | | | | AL044940, AV760466, AV713243, AW969694, AI537955, AC005527.3, AL050318.13, AC010279.4, |
| | | | | | AC000025.2, AF134726.1, AC008736.6, AC004983.2, AC004965.2, AL162458.10, AC009269.6, |
| | | | | | AC020552.4, U91321.1, AL136179.15, AC011455.6, AC020916.7, AC084783.2, AC009244.24, AL133332.12, AC009144.5, |
| | | | | | AC005755.1, AC013449.8, U95740.1, AC010319.7, AP001725.1, AC008068.4, |
| | | | | | AC011497.6, AL021546.1, AL121586.31, AC004971.3, AL021391.2, AC007055.3, |
| | | | | | AC011464.5, AC010422.7, AC006430.22, AL390738.4, AL109805.14, AC006483.3, AL033528.19, |
| | | | | | AP001716.1, AF053356.1, AP000112.1, AL160271.19, AL157882.5, AL022323.7, AC018751.30, |
| | | | | | AL121900.26, AL356354.10, AL121897.32, AC006435.7, AL160471.5, AC027689.10, AC004878.2, |
| | | | | | AL121903.13, AL121890.34, AP000044.1, AP000513.1, AC004662.1, AC027319.5, AC011236.8, |
| | | | | | AC008738.6, AL136980.5, AC020904.6, AL132640.4, AC009516.19, AC018506.4, AJ400877.1, |
| | | | | | AC003003.1, AC016587.7, AC004847.3, AC012476.8, AP000555.1, AC020931.5, AC018719.4, |
| | | | | | AC003029.2, Z93241.11, AC004797.1, AL031281.6, AP001741.1, AC016894.7, AL033529.25, |
| | | | | | AC068533.7, AC011479.6, AJ003147.1, AL163248.2, AC022148.5, AP001727.1, AL031602.14, |
| | | | | | AC008403.6, AL139021.6, AC005488.2, AC006329.5, AC079602.15, AC020754.4, AC005736.1, |
| | | | | | AC004841.2, AL022316.2, AC003684.1, U47924.1, AL031733.3, AL365225.12, AL356915.19, |
| | | | | | AC008622.5, AC008073.4, AL050349.27, AL353135.32, AC005231.2, AC004707.1, AC022083.6, |
| | | | | | AL121585.22, AC005015.2, AL137800.12, AC016025.12, AC010616.5, AP001726.1, AC027644.9, |
| | | | | | AC034198.6, AC005295.1, AC007956.5, AL139321.28, AC006050.1, AC069262.24, AC013434.8, |
| | | | | | AC004382.1, AC010553.6, AC006581.16, AC004638.1, AE006463.1, AC007739.2, AC007011.1, |
| | | | | | AL049537.48, AL049760.26, AC006211.1, AF109907.1, Z93015.9, AC011462.4, AC090710.16, |
| | | | | | AC005844.7, AC006312.8, AC002990.1, AC008474.7, AC011489.6, AC007272.3, AL136418.4, |
| | | | | | AL139054.1, AL136137.15, AL139352.16, AL109936.10, AC002365.1, AL353579.17, AC005080.2, |
| | | | | | AL355302.14, AP001710.1, AC009298.3, AC004858.2, AL035404.20, AC005531.1, AC008812.7, |
| | | | | | AC011491.5, AC024028.10, AC004089.25, AL035659.22, AL354932.26, AC005529.7, AC007226.3, |
| | | | | | AC006452.4, AB050050.1, AC005837.1, AF111168.2, AL109797.18, AL135838.5, AL355392.7, |
| | | | | | AL021155.1, AC005512.1, AL009181.1, AC009137.6, AC004491.1, AC018720.5, AL445686.14, |
| | | | | | Z97054.1, AC007686.5, AC023344.4, AC011005.7, AC007597.3, AC005562.1, AL133367.4, AC010618.7, |
| | | | | | AP000347.1, AC002369.1, AC004953.1, AC010654.8, AC005081.3, AC008946.6, AC025540.7, |
| | | | | | AC011495.6, AP001748.1, AL049869.6, AC011461.4, Z86090.10, AC002470.17, AL138724.12, |
| | | | | | AC009412.6, AC005840.2, AC008760.6, AJ009611.6, AC008985.6, AC011484.4, AC015982.9, |
| | | | | | AC002133.1, AL049709.18, AC011444.5, Z98200.8, AC010969.11, AL121652.2, AP002851.2, |
| | | | | | AC008372.6, AL022320.23, AL109965.34, AL096701.14, AL031584.1, AC018809.4, AJ400879.1, |
| | | | | | AC018808.4, AC008616.6, AL034405.16, AC016643.6, AC005077.5, AC008649.6, AP000045.1, |
| | | | | | AL355305.9, AP001610.1, AC005225.2, AL161626.20, AC020908.6, AC073542.4, AC023510.16, |
| | | | | | AC006538.1, AC008764.7, AC012170.6, Z85996.1, AC003070.1, AC005778.1, AC022384.4, AC005037.2, AC020550.4, |
| | | | | | AL137140.12, AC004859.2. |
| HPJBK12 | 147 | 1011467 | 1-2634 | 15-2648 | AP001206.3, AP001329.3. |
| HPMDK28 | 148 | 846357 | 1-1070 | 15-1084 | BG112660, BG025264, AL528310, BG168817, BE744551, BE877617, AI356771, BG163540, AA203523, |
| | | | | | BG031683, BF822950, AW592567, AA176981, AA904437, BF209639, BF312400, AU134583, BF194783, |
| | | | | | BF058517, BF445932, BF115227, BF732680, BF445936, AW303381, AW149649, AW027536, |
| | | | | | AW583459, AW475091, AA065227, BF869433, AW103970, AA703536, AA902103, AI735312, |
| | | | | | AI082224, BE262098, AW405660, AW009422, AA932869, BF940753, AI830877, AI830074, BG222176, |
| | | | | | AI742006, AI381584, AA133474, AI347025, BF869417, AI452483, AA993536, AW954279, BE737248, |
| | | | | | N66683, BE261151, AI369439, AI334008, AI005081, AL528309, BE166345, AA365303, BF222033, |
| | | | | | F32952, AI697441, AA488152, AI418548, BG248769, AI279351, AI888277, BF115544, AI200343, |
| | | | | | AA977299, AI612818, BE163359, AI830668, BE740423, AW574601, AA315546, BE397815, AA573402, |
| | | | | | BE004351, AA573411, AA633508, BF925742, AA741489, H82686, BF894571, AA065233, AA360707, |
| | | | | | AV728079, BG230581, N29979, BE561199, N98991, AW439071, AA744699, R73710, AW407745, |
| | | | | | AA877633, H99709, BF804312, AI381618, BF806994, BF806622, BF806680, BF807000, BF807012, |
| | | | | | AW407070, BF804328, BF807005, AU155517, AA933001, AA321772, W57549, BF806996, BE271504, |
| | | | | | H39645, H26855, BF807004, H82425, BF804308, BF975948, AI928746, R81659, R82397, BE791088, |
| | | | | | R73635, BE939764, AI688429, BE171442, BF378561, BE261882, BF818292, AA469038, AA913203, |
| | | | | | AA300974, BE171441, AA298641, AW999308, BF206994, BF807016, H26756, BF093709, AW884799, |
| | | | | | BF737549, AW797205, H11203, AA305598, R81461, BF773046, BF804289, AI738864, BE814697, |
| | | | | | H49134, H40077, AW889970, AI669504, BE561022, BE394911, AA911419, H40072, BF806979, R82344, |
| | | | | | AI701370, AI984879, AA064931, AI300423, AA380950, AI301586, BE902194, BE707909, AI983746, |
| | | | | | AA533457, AW803830, AA737402, AI926327, AI263788, R52293, F26866, AA827751, BF868527, |
| | | | | | AI168033, AI265814, AI264365, AW085104, AI982777, AW590204, AI381485, AI972009, AA580064, |
| | | | | | AA463767, AU130766, BE673288, BF109947, AA364441, BE464383, AI693626, AA133473, AW410601, |
| | | | | | AI685572, BF437257, AI279199, BF437797, BF064139, BE080941, BF059063, BE671687, AA064925, |
| | | | | | AI051392, BE348682, AI457365, AW341328, AW408516, AA622272, AA642661, Z21606, AA732692, |
| | | | | | AI261971, AA976709, BF091789, AW002951, BE163143, AI697458, T25507, AA341138, N86893, AI951605, BF058146, |
| | | | | | BE270120, BC008070.1, AK001809.1, AF277178.1, AK023110.1. |
| HPRAL78 | 149 | 1352342 | 1-2058 | 15-2072 | BF342508, BE745079, BF316647, AW954022, BF219864, BF220093, BF182978, BG108443, BE879671, |
| | | | | | AI684112, BE840525, AW957217, BE840530, AI148569, AI128199, AL041807, BF027688, AA401860, |
| | | | | | BF915566, BF914452, AA938143, AA588312, AI991034, AI672251, AI862148, AI333529, AI798586, |
| | | | | | AI095534, BF826436, AA976203, AA424398, AI475525, AL039685, T52017, AI055912, R51437, |
| | | | | | AW071787, AI598282, AA578538, AA554343, AI140222, AW268634, AI300146, AA340540, AA411182, |
| | | | | | C04045, AI926947, AW088744, AA757547, AI798454, AW473352, AV691484, AI076726, AV647523, |
| | | | | | AW475065, AA364829, AW028194, AW249610, W22554, H66782, AA081290, N95459, W25198, |
| | | | | | R60726, AI311111, AI351724, AW614976, AA506965, AI142999, BF091172, AA604134, T63960, |
| | | | | | BE840632, AI583100, AI351726, AW009121, AA081115, AA081697, AA411256, BF679941, R60727, |
| | | | | | AA578520, AW129067, AA612772, AI824391, AA470674, H66783, AW953852, AW006565, N34727, |
| | | | | | AW160746, AA832062, R36715, R90863, R84524, BF924179, H12158, AW770335, AA315553, |
| | | | | | AA702770, AW246146, AA370468, AA832305, AW082570, AI568825, BF929006, AA251006, |
| | | | | | AA043375, AA508725, AW068182, AA766464, BE769780, AW316684, BE260322, BE819573, |
| | | | | | AA082047, AA370467, BF929011, BG056952, AW241232, BF751574, AI686507, AL050275.1, BC008720.1, AC022007.3, |
| | | | | | AC018809.4. |
| HRABA80 | 150 | 882176 | 1-1237 | 15-1251 | AU147250, F24079, AI791459, AI732503, AA523577, AI791342, AU121439, BF309840, BF308519, |
| | | | | | AI659402, AA719317, AA602233, AI752815, AW967109, AV694013, AA470486, AI218622, AA644545, |
| | | | | | AK022184.1, AC005777.1, AL031431.8, AC007406.1, AC032011.14, AC004143.1, AC006131.1, |
| | | | | | AC074121.16, AC005760.1, AC005529.7, AL354766.17, AC025166.7, AC012476.8, AC005544.1, AL035079.14, |
| | | | | | AL356299.16, AL031297.4, AC005778.1, AC011666.28. |
| HRACD15 | 151 | 871221 | 1-1525 | 15-1539 | AL519765, AL519766, BE910445, BF684654, BE270497, BE513843, BF975936, BE396890, BF973472, |
| | | | | | BE515166, BF686665, BE744708, BG257119, BE880162, BE797305, AW248552, BE514176, BE793786, |
| | | | | | BE791776, BE296702, BE271500, BE268991, AW512838, BE791090, BE727326, BF026627, BE797018, |
| | | | | | BE275277, BE277906, AU133849, AW248687, AU120611, BE270509, BF027092, BE384166, AI565668, |
| | | | | | BE513807, AW405789, AU151587, AA261853, AW043669, BE729554, AI949119, AW575486, |
| | | | | | AW751019, AI524253, BE391940, AW245114, AU145208, BE312276, BE796133, BE561087, AI953094, |
| | | | | | BE390017, AA283855, BE265439, BE391036, BE391843, AI620547, AW402545, AI075157, AI744741, |
| | | | | | BF125945, BF941740, W60104, BE266246, AW085553, AW131075, AI768378, AA401964, BE390215, |
| | | | | | AI752668, BE736619, AW967867, AI565659, BE387591, BE222775, AA283856, AW750999, AA261854, |
| | | | | | AI498229, AA830894, W60024, AA496293, AI660481, BE960924, BE277521, AA994223, AA868400, |
| | | | | | BF026241, BE382766, AI801124, BE671092, AI264882, AI355420, AW248994, BE503489, AI262893, |
| | | | | | AA583344, BE266582, AI832018, N29665, AA622755, AI439625, AI193362, BF446254, BE504260, |
| | | | | | BE387503, AW806699, AU146635, BE856089, AI087826, BF801189, AA133817, AA843858, AI287716, |
| | | | | | AA928793, AA699788, AI027345, BE728607, AW629986, W52804, T10369, AW103963, AA933691, BE138812, AI284845, |
| | | | | | AW264928, AW152071, AI265798, AI809041, AI038469, AW246086, AI435409, |
| | | | | | AV691151, AW957437, AI620834, AI452870, AI860541, AI475835, AI418409, AI744163, AW002187, |
| | | | | | AV692842, AI521647, AA845397, AI744800, AW002140, AI309558, AU118709, W96176, AW768771, |
| | | | | | BE207457, AW236670, AW264115, D29066, AA026580, AA135589, H55790, AW732194, BG006063, |
| | | | | | AI024919, AA256768, AI214884, AA280734, AA565467, R87509, BF056311, AA643222, AI024305, |
| | | | | | BF204467, AA077296, BF310268, W07856, T30234, R48997, AI435115, AI567828, AI537884, |
| | | | | | AW050631, AI740587, BE162565, BE149783, AW090152, T10368, AW627586, AI537596, AA622914, |
| | | | | | T50404, AW016161, W45022, AI274609, AA570075, AL039562, AA827726, AW246353, W04715, |
| | | | | | H89133, BF125722, AA626654, AW246566, AW519242, AI659744, AI752669, AW247535, AA077415, |
| | | | | | AW129363, AI202252, AA628809, BE869982, AI208476, BE206952, AW511835, AA037397, BF828156, |
| | | | | | BG031018, BE513491, BE736901, AW149144, AI189756, AA078651, BE513973, BF194732, H47888, |
| | | | | | AW954928, AA806404, AW080710, BF847605, AA077110, AA319080, AA101354, AI214676, |
| | | | | | AA434187, AA932091, BF837875, BE140453, AA428843, R11194, AA778244, AA077601, AW082443, |
| | | | | | N90686, AI675644, BF794477, W05073, AI520907, AL046053, AW298462, AA496322, T50535, |
| | | | | | BC008084.1, AK001129.1, AK021688.1, BC007488.1, AL117583.1, AC006014.2, AB014518.1, |
| | | | | | AC005488.2, Y16704.1, N54250, N81046, AA036807, AA135546, AA236044, AA262692, AA938381, AA204918, AA402082, |
| | | | | | AA455506, AA455507, AI217271. |
| HRACJ35 | 152 | 877666 | 1-2063 | 15-2077 | BE906771, BE218907, AI912661, BE670671, BG166321, AW167740, AI698131, AI796048, BF476110, |
| | | | | | AW952474, AW474992, AW149683, AI814137, BF436724, AA452391, AI635719, AI422285, AI675301, |
| | | | | | AW301634, AI800309, AI023300, AI269915, AA054467, BF062213, AI220479, AA991181, AI159765, |
| | | | | | W88683, AI623293, AI205308, AA043330, AA461136, BE669608, AI032982, AA634903, AI361429, |
| | | | | | AA877688, BF681677, AW868366, AI683625, AI094869, AI268543, AI040482, AA460833, AI042583, |
| | | | | | AI800329, H40189, AA041196, AI420048, AA127006, AI023081, AA045134, T96696, M79132, W23483, |
| | | | | | BF000996, AI161385, BF476853, AI521085, AI984382, AA492294, AA016124, N95081, R13864, |
| | | | | | AI146307, W28330, AI022619, T19296, AA410735, BF573582, BF056915, T30952, AI971069, |
| | | | | | AA043329, AA126627, AA215786, R07660, BE833878, BE833866, AA329616, BE833882, BE833868, |
| | | | | | AA977851, Z41866, AA226105, AA126801, AA056673, AV693019, AA216384, R18560, AA041433, |
| | | | | | AW244035, R05716, AA868767, BF222351, H40140, AW589719, AV686312, BF207973, AA226035, |
| | | | | | AA228673, AI817777, AI420271, AV747189, AI248289, R05717, T30818, BF847400, Z38161, |
| | | | | | AA879250, D57208, R37006, AA319785, AI699205, T96591, AW945698, AA225132, AA333327, |
| | | | | | AA045610, D57177, AA226695, AA045355, BE905736, BE670421, AW469919, BF000980, AW771589, |
| | | | | | BF871391, F19153, AW152062, AW964837, R41427, BE242459, BF445505, AW373047, AW069103, |
| | | | | | W88670, AA761464, BF844537, AF107834.1, AF119386.1, AP003117.2, AF107833.1, AP003111.1, AP003112.1, AP003477.2. |
| HRGBL78 | 153 | 910133 | 1-2094 | 15-2108 | BE271199, AW575245, BF794609, BF797900, BE559773, BE384088, BE513826, BE270971, BF572042, |
| | | | | | BE560978, BF690655, BE674800, BE275832, BF303959, AW205367, AW402801, BF203242, |
| | | | | | AW402242, AW402928, BF305905, BE466652, BE892536, AW403946, N24246, AW968460, AI654541, |
| | | | | | N28316, BF572179, N29315, N38941, AW383418, AA458944, AI276242, BE729612, AA215300, |
| | | | | | N33010, AW383426, AW383396, N20230, BF692515, AI439520, N29316, AA459158, N25452, W03476, |
| | | | | | AW383428, AW402824, N30453, N28949, N21241, AI760983, N20533, AI434284, BG025865, N72999, |
| | | | | | N20563, BF896859, AW403434, N67502, AI470743, N73074, AA837208, AW407871, H84381, |
| | | | | | AW404443, N26470, W02963, AI864746, N46511, W02298, H98912, H84382, N35519, H99497, BF890914, AA761778, |
| | | | | | N71796, AI222330, BC006521.1, AL359541.11. |
| HROAJ39 | 154 | 1181699 | 1-1132 | 15-1146 | T66247, BE081925, R34513, F12057, AA852760, AA125904, BF996914, BF107281, BF743278, |
| | | | | | BF742834, AB040901.1. |
| HROBD68 | 155 | 827306 | 1-1984 | 15-1998 | AI921101, AW102963, C17730, AW139132, AI499286, AU157470, AW157413, AW517766, AI285660, |
| | | | | | AL038713, AU146974, AA779937, AW272376, AI862212, AI246569, W58428, AU145383, AI051341, |
| | | | | | AI925647, AI869945, N77920, AI591332, AI440018, AU148220, AI872191, AV695638, T06365, |
| | | | | | AI310239, AI559442, AI818151, AA811111, AI453790, AA130476, F16040, AI685116, AI610326, |
| | | | | | BE646447, AA166854, AI540098, AI375417, AI887321, AA767353, AV693309, N20521, AI369914, |
| | | | | | AA846188, H96719, AA961590, AI088245, AA902828, BF112065, AA129986, AI439415, N30146, |
| | | | | | AI817158, N33132, N31608, AW084901, AA055654, BE245707, AI619818, AI628308, N20064, |
| | | | | | AV726924, AA347740, AA932087, AA657353, AA550798, AI028382, AW262471, AI147839, AA132716, AA460715, |
| | | | | | AI250812, H97388, BG027070, AW072619, BF002501, AI568919, Z36956, |
| | | | | | AI538654, N90055, AI376849, AI952804, AI264673, AA468571, AA584498, H04879, AA342051, |
| | | | | | AI733728, BF963854, AW962610, AA099788, AI858607, AI189033, AA157033, AI675848, AA722562, |
| | | | | | AA659014, AW468555, AA862135, AA911409, AA226507, AI244642, N24958, AW085676, AA169142, |
| | | | | | AA364962, AA569918, BF221900, AU156129, AV702748, AA016272, AI601265, AW272291, AI082077, |
| | | | | | AI376984, AI377100, AA864823, W16525, N26697, AL110383, AW088343, BE264670, T48029, T69889, |
| | | | | | AA724610, W96522, AA826143, AW753399, AI827133, AI783731, AI598077, AA565911, AL523955, |
| | | | | | BE677100, BF772474, AV695478, BF576607, AU143935, AL521095, H20876, W31567, BF805088, |
| | | | | | R70883, AA136630, H01156, AI521525, AA503213, H68343, BG152386, AI890971, AC009623.6, |
| | | | | | AC008173.2, AC084881.19, AL161901.18, AC020892.7, AC020603.4, AC024341.9, AJ271735.1, |
| | | | | | AC002486.1, AC013719.8, AL109847.5, AL138965.10, AL137011.9, AL356962.8, Z99758.7, |
| | | | | | AC005798.10, AL163202.2, AC073200.6, AC004894.1, AL451083.5, AC004087.1, AC025040.7, |
| | | | | | AC015987.5, AL163152.4, AL353772.14, AL590043.7, AC002527.1, AC009483.3, AB045357.1, |
| | | | | | AC005885.1, AL360089.13, AC067941.7, AL163203.2, AL162500.15, AP002532.1, AL355581.14, |
| | | | | | AC006334.3, AL445383.5, AB000882.1, AC021017.4, AP003493.1, AC073964.3, AL139109.14, |
| | | | | | AC010252.3, AC009802.13, AC023842.5, AP002797.3, AC008109.6, AL050309.4, AL353650.5, |
| | | | | | AL442183.4, AC006043.1, AC010719.4, AF224669.1, AC012558.8, AL022153.1, AL121578.1, |
| | | | | | AC010747.10, AC003091.1, AP001691.1, AL049732.11, AL583822.6, AC073137.7, AC003051.1, |
| | | | | | AC009120.8, AC007102.4, AL512427.10, AC018616.5, AP000949.2, AC018468.4, AL355888.3, |
| | | | | | AL050329.12, AL035466.3, AL139110.17, AC003083.1, AC087431.2, AL159152.11, AC007773.1, |
| | | | | | AC008427.7, AL138703.10, AC079631.16, AL133370.4, AL109753.9, AL512310.3, AC019041.8, |
| | | | | | AL160413.7, Z82205.1, AC016831.1, AP001692.1, AF017104.1, AL157915.3, AL355365.10, |
| | | | | | AC000112.1, AC003012.1, AL392087.7, AP000077.1, AC025226.4, AP001683.1, AC006249.1, |
| | | | | | AC007000.2, AC004605.1, AL158158.14, AC005668.1, AC022467.7, AC006239.5, Z98304.1, |
| | | | | | AL359085.14, AP000506.1, AC007262.4, AC034245.4, AL450305.7, AL356005.9, AL163248.2, |
| | | | | | AC090527.3, AF001549.1, AC008014.5, AP001922.4, AC005213.1, AC025471.5, AC006287.1, |
| | | | | | AL121595.5, AC012491.7, AF241726.1, AC069543.4, AC022363.24, AF196972.1, AC005562.1, |
| | | | | | AC022274.5, AP002436.3, AC002456.1, AC021070.24, AC008774.5, AC019100.4, AC004993.1, |
| | | | | | AC004848.1, AC002541.1, AL513011.7, AL163227.2, AL354831.18, AC008444.4, AC026167.4, |
| | | | | | AC013410.5, AC005146.1, AL035552.9, Z83850.1, AL139090.11, AP001700.1, AL356269.10, |
| | | | | | AL136307.12, AL390731.9, Z83822.1, AC024900.20, AC034240.4, AL354937.12, AC005939.1, |
| | | | | | Z98754.1, AL512449.6, AC005378.2, AC021015.4, AC006961.16, AC025920.12, AL163247.2, AC078957.16, |
| | | | | | AC007533.2, AP000402.2, AF130343.1, AL009172.1, AC008583.5, AC006370.2, |
| | | | | | AC004066.1, AC009892.5, AC018645.4, AC005988.1, AL132985.4, AC005188.1, AL356276.9, |
| | | | | | AC020644.6, AP000742.4, AP001686.1, AL133353.6, AL049767.12, AL121868.11, AC015541.21, |
| | | | | | AC005358.1, Z74696.1, AL163280.2, AC000115.1, AL589693.3, AC002458.1, AC025887.4, AC005406.2, |
| | | | | | AL358112.20, AC026162.5, AL135978.4, AL391221.15, AE000661.1, AC022404.7, AL031643.1, |
| | | | | | AC005951.1, AC068139.5, AL138758.7, AC006213.1, AC007163.3, AC011247.10, AL512641.9, |
| | | | | | Z99571.1, AC009319.19, AL022308.1, AL049831.2, AL158193.13, U82670.2, AC061958.11, |
| | | | | | AL158038.10, AC004740.1, AC084373.24, AL355612.8, AL359197.20, AC015502.6, AP001681.1 |
| | | | | | AL136419.2, AC025265.21, AL137145.13, AC021382.6, AC010140.3, AP001674.1, AC006994.4, |
| | | | | | AC005593.1, AC006840.17, AC019072.7, AC009961.11, AC026743.4, AC006016.2, AC068726.5, |
| | | | | | AL359502.14, Z82216.1, AL035427.17, AC078961.23, AL137226.3, AC024084.4, AL157698.8, |
| | | | | | AC021079.4, AF241725.1, AC005901.1, AC010376.5, AC011288.4, AC068812.13, AC022267.8, AL132800.4, AC021850.8, |
| | | | | | AF235093.1. |
| HSAWD74 | 156 | 460527 | 1-956 | 15-970 | BG056446, N32720, AW152171, AA339555, AA076697, AA525291, AA380007, BE734992, AA077031, |
| | | | | | AA379882, BE047929, AA515728, AI282253, AA683069, AW275432, AW274078, AA533025, |
| | | | | | AI675615, AL040054, AA644090, AI345123, N42169, AW023111, AV756491, AI962030, AV758870, |
| | | | | | AW021774, AA602906, BG222564, BG222326, AV762454, AL048060, AA225406, AI879951, |
| | | | | | AA078830, AW514006, BE063437, BF725844, AI591299, AI590522, H68343, AA825827, AA559166, |
| | | | | | AW272294, BF213224, BE049095, AI344810, AA714011, AW502237, H63660, H24331, AA171400, |
| | | | | | AL449689, AI753113, F18888, AA282951, AV761486, AW193493, AA669238, AI557644, AI049868, |
| | | | | | AW631267, AA525331, AW117740, AA507623, AA862183, BE968744, BE677164, AW571963, |
| | | | | | AI433952, BF991881, AA701080, BF970107, BF212465, AA832175, AA470933, AW157128, AI343144, |
| | | | | | AW974751, AW338376, AW410409, AW844636, AW664505, AA827383, AV760014, AI745116, |
| | | | | | AI003611, AV683406, AW021154, AW501278, BE968477, BF991882, AI189682, AU124213, AI336637, |
| | | | | | AW572140, AA610644, AW963463, AA708322, AA489390, AI887235, AC004084.1, AC004951.5, |
| | | | | | AP000252.1, AP001711.1, AC006160.9, AP000031.1, AC022383.3, AC009131.6, AL354864.16, |
| | | | | | AL121900.26, AP000212.1, AP000134.1, AL031281.6, Z99716.4, AC009144.5, AC005015.2, |
| | | | | | AL137852.15, AP001207.3, AL035458.35, AP001753.1, AC026794.4, AL139022.4, AC009179.17, |
| | | | | | AL033383.26, AC090498.2, AC011472.7, AL162578.13, AL590762.1, AL117380.28, AF045555.1, |
| | | | | | AE006467.1, AC006088.1, AL096701.14, AL137881.12, AC011491.5, AC018828.3, AC005081.3, |
| | | | | | AC034193.4, AL110115.38, AB001523.1, AL023586.1, AL022237.1, AP000348.1, U91322.1, |
| | | | | | AL049591.12, AL133367.4, AC018808.4, AC091529.1, AC005666.1, AC011497.6, AL450339.5, |
| | | | | | AC004655.1, AP001718.1, AC005052.2, AC026866.8, AL136228.8, AC005793.1, AL139317.5, |
| | | | | | AL354720.14, AC004129.1, AL035461.11, AL161727.15, AF217413.1, AC007371.16, AL049539.21, AL008729.1, |
| | | | | | AC000353.27, AC003962.1, AC005940.3, AL158830.17, AF001549.1, AC004263.1, |
| | | | | | AC006441.13, AP000345.1, AC011811.42, AE006640.1, AL035086.12, AC004777.1, AC055120.5, |
| | | | | | AC002430.1, X02571.1, AC009477.4, AC006285.11, AC006597.2, AC018663.3, AC011479.6, |
| | | | | | AL139193.4, AC005692.1, AC009220.10, AC005907.1, AC007384.3, AC005049.2, AC004913.2, |
| | | | | | AC010328.4, AC005701.1, AC016025.12, U59962.1, AP003357.2, AC006345.4, AC006241.1, |
| | | | | | AL356805.5, AC004089.25, AC009247.12, AC005520.2, AC004910.1, AC027319.5, AC011495.6, |
| | | | | | AC008126.9, AC008521.5, AC005231.2, AC006449.19, AC002554.1, AL138720.19, AC011485.6, |
| | | | | | AL138875.8, AC008747.5, AC002994.2, AC003029.2, AC005291.1, AC006430.22, AL121712.27, |
| | | | | | AC078962.30, AL359082.16, AC004647.1, AC002429.1, AJ277546.2, AL133351.33, AL355102.5, |
| | | | | | AL391827.18, AL137140.12, AC004812.1, AC005098.2, AL390878.6, AL512883.5, AC090958.1, |
| | | | | | AC004883.2, AL135924.11, M12901.1, AL109984.14, AC018758.2, AL133477.16, AC012170.6, |
| | | | | | AC026185.3, AC005736.1, AC090426.1, AF283320.1, AC012499.7, AC011446.6, AC005288.1, |
| | | | | | AC005355.1, AC006581.16, AL162430.15, AL133500.3, AL109865.36, AC010271.6, AL445195.4, |
| | | | | | AC005005.1, AC003043.1, AL354815.10, AC083884.6, AC008755.6, AL021579.1, AL354935.23, |
| | | | | | Z81364.1, AL109925.11, AL139339.22, AC004876.2, AC020983.7, AF195658.1, AL022727.1, |
| | | | | | AC005598.6, Z93930.10, AC011480.3, AF312915.1, AC005220.1, AC074121.16, AL139123.14, |
| | | | | | AC010679.6, AC027124.4, AL157838.24, AC010205.5, AL049547.10, AJ300188.1, AL357972.18, |
| | | | | | AC002350.1, AL356095.11, AL162505.20, AL118502.38, AL022331.1, AC021016.4, AC008753.8, |
| | | | | | AC011890.4, AC005409.1, AC005516.1, Z97987.1, AC010458.5, AF053356.1, AC006111.3, AC007537.3, |
| | | | | | AC002133.1, AL390026.1, AC002319.1, AL137142.20, AP000555.1, AC005180.2, AL135838.5, |
| | | | | | AC024028.10, AL034429.1, AC007055.3, AC007298.17, AE006639.1, AL078633.32, AC066597.4, |
| | | | | | AC007766.1, AC010605.4, AC025280.4, AC005363.1, Z68870.1, AL162503.12, AP000501.1, |
| | | | | | AL355101.2, AC006208.3, AC010422.7, AC008752.6, AP000901.5, AC008569.6, AP000346.1, |
| | | | | | AL031121.5, AC005038.5, L78810.1, AC005839.1, AC005037.2, AL391374.9, Z83840.7, AC005911.6, |
| | | | | | AC004840.3, AL034402.9, AC005228.1, AL035464.20, AL355336.15, AL121920.21, AC025166.7, AC011465.4, AC005695.1, |
| | | | | | AL133448.4, AC007003.4. |
| HSDEK49 | 157 | 1352253 | 1-1768 | 15-1782 | AL513706, AL513705, AV700980, BF343961, AV710516, AV716397, AV715849, BF351156, |
| | | | | | AV717025, AW071975, AI922669, AI129815, BF106386, AA702864, W32947, AV690218, AV685715, |
| | | | | | AV693576, AV686846, AV695322, AV697709, BF924861, AI168499, AI343825, AA627735, AI554367, |
| | | | | | AI335089, AV697729, AI290781, AA875852, AA442570, AV686969, AV698914, AA486920, AI357884, |
| | | | | | AI088635, W79882, R39812, AV683817, BF932594, W17367, N78991, AA972857, R62969, R59135, |
| | | | | | AW961380, R56601, BE857524, R66262, W74268, AA436814, AA813538, H05057, AA133776, Z43556, |
| | | | | | R14044, R81029, T48889, AA228697, R56602, AA142932, R63023, Z39624, F02373, AA993978, |
| | | | | | R66723, R67603, R59136, R80928, AA133775, AW874480, T48888, AA228698, AA368546, BF525711, AA115592, AA328299, |
| | | | | | AA486747, BG001652, AJ132502.1, AL034397.1. |
| HSDFJ26 | 158 | 834619 | 1-1191 | 15-1205 | AI770009, BE467511, AW593206, AA434584, AI767843, AA780308, AA563708, AA317400, AA433906, |
| | | | | | AB021123.1, AC005598.6, AF361936.1. |
| HSDSB09 | 159 | 1301498 | 1-795 | 15-809 | BF432333, AI861851, AI240993, AI795956, AI074484, AI640759, AW006868, AW241621, BF592070, |
| | | | | | AW271387, AW614840, AW450466, AW243423, AI244694, AI640517, BF431431, BF431530, AI439169, |
| | | | | | AI613108, AI915938, AI984796, AI245393, AW300335, AA931466, AW235983, AC005722.1. |
| HSDSE75 | 160 | 545057 | 1-1137 | 15-1151 | AW378251, BF349814, AA687791, BF739001, AW378183, AA661723, H61383, T88677, H62404, |
| | | | | | AA443169, AW339864, AA458622, AA252063, AI129690, AW960791, AB006755.1, AB006756.1, AB006757.1. |
| HSIDJ81 | 161 | 589447 | 1-1289 | 15-1303 | H27567, H27494, H71543, AI754653, BF857849, AW023111, AI521525, AW572721, AW963450, |
| | | | | | AI254770, AI926102, AV701462, AW020150, AI871973, AW500534, AW275432, AA218851, |
| | | | | | AA595661, BF854170, BF853574, BF853009, AW151247, AA536040, AW274078, AW958962, |
| | | | | | AI791659, AA669238, AI223626, AI249853, AW302048, BF725844, AI284543, BE139139, AW855625, |
| | | | | | AL042621, AW575000, AI801505, N68677, AI250552, AV758870, AW272294, H86725, AW851405, |
| | | | | | AI625604, AI251034, AA525807, AW075979, AI697235, AI090377, AA570255, AA702637, AV760014, |
| | | | | | AA729387, AA831426, AI697239, AI697242, AW504224, AI879951, AW502949, H77492, AW514065, |
| | | | | | AI224583, AV759203, BF527070, AA491767, AA229496, AL158830.17, AC005412.6, AL355855.23, |
| | | | | | AL132718.5, AL391868.15, AF285442.1, U91321.1, AP000505.1, AF129756.1, Y14768.1, AB000882.1, |
| | | | | | AL353804.22, AC005013.1, AC004448.2, AL139415.10, AC009309.4, AC091529.1, AL391122.9, |
| | | | | | AC009996.7, AL354836.13, AC010530.7, AC005274.1, AC007242.3, Z98048.1, AL354861.11, |
| | | | | | AC006121.1, AC007685.2, AC020552.4, AC008126.9, AC090509.1, AL096701.14, AC090951.1, |
| | | | | | AC066597.4, AC068319.4, AC006581.16, AC005332.1, AL117334.29, AC005200.1, AC024163.2, |
| | | | | | AC005632.2, AL031447.4, AL163279.2, AL355074.5, AL121586.31, AL021546.1, AJ295844.1, |
| | | | | | AC005484.2, AC013717.8, AL445196.7, AC007255.4, AC008760.6, AL136219.17, AL160274.9, |
| | | | | | AL031277.1, AL390037.16, AL031658.11, AC012170.6, AC005102.1, AC026464.6, AF228703.1, |
| | | | | | AC008068.4, AC005921.3, AL121808.4, AC004699.1, AC009412.6, AL031311.1, AC007216.2, AB053170.1, |
| | | | | | AL109965.34, AC009488.5, AF312915.1, AL132713.11, AL133173.19, AC087225.1, |
| | | | | | AC022516.4, AC009314.4, AC007376.9, AL034420.16, AC007850.29, AC005280.3, AL449305.4, |
| | | | | | AC020913.6, AC010326.6, AL391259.15, AL512885.4, AC004824.3, AC024168.4, AC009137.6, |
| | | | | | AL023575.1, AC010271.6, AC011446.6, AC004000.1, AC090005.1, AL121594.6, AL031726.22, |
| | | | | | AC005180.2, AL136305.14, AC006251.3, AL139316.5, AC007262.4, AL109963.4, AC012085.4, |
| | | | | | AP000503.1, AC005995.3, AC007041.3, AL121903.13, AL139039.17, AL121973.2, AL022326.1, |
| | | | | | AC073101.7, AL359986.15, AC006449.19, AL356257.14, AC019206.4, AL358237.13, AL138720.19, |
| | | | | | AC006457.3, AL162458.10, AL034380.26, AP002436.3, AL445143.2, AC010223.5, AL157952.8, |
| | | | | | AC007707.13, AL031293.1, AC008641.6, AL357315.14, AC003080.1, AL138688.27, AL138752.5, |
| | | | | | Z95115.1, AL158207.15, AC004840.3, Y10196.1, AC005859.1, AE006465.1, AL356115.9, AC018492.6, |
| | | | | | AC006455.2, AC018764.6, AL117348.25, AL049835.3, AL118520.26, AC004491.1, AC005480.3, |
| | | | | | AC090518.2, AC010618.7, AC005940.3, AF111168.2, AP000213.1, AC018636.4, AL356299.16, |
| | | | | | AC091493.1, AL136179.15, AC005257.1, AL096791.12, AL139113.21, AP000135.1, AL357518.15, |
| | | | | | AL021808.1, AL133453.3, Z93017.6, AL365444.11, AL390838.26, AL445669.9, AC008812.7, |
| | | | | | AL513008.14, AC007537.3, AC004447.1, AC003029.2, AC026776.4, Z97054.1, AC005399.19, |
| | | | | | AC010412.7, AL133466.22, AL136164.8, AC005527.3, AP000031.1, AC010616.5, AC074295.7, |
| | | | | | AC090532.1, AC004846.2, AC018808.4, AP001724.1, AC005529.7, AC004551.1, AL353777.18, |
| | | | | | AC004686.1, AC008044.4, AC018663.3, AC004873.3, AP001412.2, AL022316.2, AF064858.2, |
| | | | | | AC008279.3, Z94801.1, AC010363.6, AL162390.9, AC005070.1, AL078596.8, AL590762.1, |
| | | | | | AC079177.21, AC003101.1, AC004644.1, AC006101.3, AC005516.1, AL353798.9, AC002037.1, |
| | | | | | AL049576.19, AC008784.6, AC011455.6, AL162584.9, U82828.1, AF134726.1, AC009319.19, |
| | | | | | AC007541.9, AL136295.3, AC013449.8, AL132780.5, AL109952.15, AC005081.3, AC007991.7, |
| | | | | | AF168787.1, AL136304.10, AC004789.1, AL354808.24, AC027130.5, AP000152.1, AL138958.18, |
| | | | | | AC020633.3, AC004813.2, AC018500.3, AC006077.1, AL109956.19, AL139317.5, AC004851.2, AF243527.1. |
| HSKDA27 | 162 | 1352409 | 1-4398 | 15-4412 | BF338364, BG253437, BG122685, BF037455, AW303375, AW173315, BF037378, BG120262, |
| | | | | | BG117983, BF915045, BF057308, BG252401, BG034853, BF793365, AW379378, BF826037, AA570507, |
| | | | | | BF915582, BG122734, W07328, AA600736, AI971935, BE697573, BE313814, AI090486, AI751258, |
| | | | | | BE839359, BF447303, AW631492, AA625303, BF513067, AI609700, AI768270, AI751257, BE39504, |
| | | | | | AA417652, AI751036, BE378218, AI652363, AI971415, AA599207, AI371013, AA024968, AI147536, |
| | | | | | W55850, AA063585, AW794702, AA446024, BE889110, AI828437, AI862133, AA421744, AI272646, |
| | | | | | AI148235, AA419609, AW005418, AA634323, BF883408, BF378271, AA416767, AA258414, |
| | | | | | AW305114, AI083516, AI752526, AW024492, AI698032, AW957682, AI092202, AI191710, C05155, |
| | | | | | AA419525, AI218226, AI754332, AW794499, AA410929, AI936116, AI079893, BE272411, AA593295, |
| | | | | | AA455497, AI039656, BG035195, AA747741, AA774270, AA364833, AI350380, BF940413, T59268, |
| | | | | | BF197746, AI084698, AW800540, AA834031, AI673545, AW795817, AA978105, AA622501, |
| | | | | | AA032249, AA912802, AI432010, N66832, AI751035, AI754989, AI082183, BE178218, AI751086, |
| | | | | | N75819, N67061, AA971661, AA873147, AA478719, AA036654, T59227, AI538117, AA662437, |
| | | | | | BE765721, T66232, AI751085, AW674273, AA024662, BF197986, AI564218, AA319726, AA657729, |
| | | | | | N64555, AA852211, C03119, AI221431, AA455496, AA033678, C04206, AI520867, AA258397, |
| | | | | | AW867914, AW867908, AA382381, N24008, AA456579, AA936765, AI433202, AA446297, AW338252, |
| | | | | | BF940540, AI075349, D31528, BE839377, AI537292, AA382234, AI446798, BE839418, AA459088, |
| | | | | | BF724219, BE839363, BE773013, AI064722, AW375493, AW375513, AW375482, AW375483, |
| | | | | | AW375502, AW370152, AW134700, BF352435, AW375514, F12285, BE772982, AW797394, BE839409, |
| | | | | | BE710069, AA299257, AI061637, BE773049, AW375497, H63649, AW805832, H29954, AI587210, |
| | | | | | AW836298, BE773047, H75893, BF985423, BF089372, AA610296, T73259, D30912, BE839372, |
| | | | | | BE934501, AW937287, AL531501, AI270416, AW376140, AW838930, AI886158, AA375571, |
| | | | | | AL134647, H94943, BG006581, AW964941, AA336003, AA410897, R94988, W47433, R64321, D31541, |
| | | | | | W39467, AV693669, T82080, W04350, AA384793, AW572523, BE693478, AW375499, BF569459, |
| | | | | | AA428478, BF001215, H43934, AA382233, Z20767, AA382380, BE157468, W16893, BE066790, |
| | | | | | AW384231, BE157596, H80974, R96403, BE814079, AA345211, BG153436, AV654605, BE157507, |
| | | | | | AW292030, H62182, AW384236, AI382511, BF674009, AA335755, H25902, W65400, BG169442, |
| | | | | | AV710284, T64640, AA994712, BF944442, BF725435, BF726055, BF917617, W67868, H71581, |
| | | | | | AA326037, M14036.1, X07577.1, M13690.1, M13656.1, M13203.1, X54486.1, X07432.1, AB062098.1, X07431.1, AB062097.1, |
| | | | | | AB062096.1. |
| HSKGN81 | 163 | 676075 | 1-1893 | 15-1907 | BG110811, BE745101, BE743722, BE545826, BE745120, BF681303, AW978606, AV702796, BE047756, |
| | | | | | BF848815, AW961578, AA446896, AI422823, BF848816, AI911304, AI038608, AA312710, AI143843, |
| | | | | | AI150244, BF829479, AI193547, AA705005, AI268239, AI140112, T65948, BE547522, AA393113, |
| | | | | | AI366477, AI085862, AI074853, AI277116, AI983894, AA394060, AA643650, AA100891, BF819277, |
| | | | | | AA922511, AV762171, AA478086, AI689302, AI275103, AI359079, AA532473, AV729423, BE349933, |
| | | | | | AI287604, AA477628, AV704180, BF847512, AI921910, AW105712, AW370596, AI624549, AW149890, |
| | | | | | AA505962, AA321215, AI357856, AA292337, BE292730, T34097, AW439882, AA447016, AI914726, |
| | | | | | R42595, AI858704, AI446219, AI275944, Z43230, BE707350, AW194214, AA135290, AW378090, |
| | | | | | BE241555, BE243232, AA010669, AW953547, AA632244, AW662488, BG057144, AW068278, R12726, |
| | | | | | BE151809, AW674205, T74373, N78860, BE242323, T31535, AI689506, R27706, F09665, R17501, |
| | | | | | AA435604, AW572245, BE548954, AI023355, BE545268, Z41318, AA383547, AA454729, AA570630, |
| | | | | | AA031630, AW173762, AW840945, AA381001, AA234325, T35951, Z45645, BE242712, T35949, |
| | | | | | AI866536, AA381111, AA693741, D82426, U83555, BE243322, F12018, AW793087, D82527, T64523, |
| | | | | | AW130852, AW262657, AA090647, AA359844, T19865, AA082483, U52870, R39778, W17267, AW603488, AA858156, |
| | | | | | AW068025, AW801618, BE242609, R05679, BE672790. |
| HSNAD72 | 164 | 467397 | 1-847 | 15-861 | AW971203, AW861646, AI610321, AI880774, AA829195, AI880765, AA551170, AI969833, AA133550, |
| | | | | | T61620, AV758870, AA557945, AW873417, AI635819, C06160, AV761107, BE268727, AA743968, |
| | | | | | AA845333, BF574331, BG222875, BF946125, BF882222, BE068993, BF946124, AA493841, AW169469, |
| | | | | | AI251576, AI821901, BE044000, AI701898, H86399, H47461, AI338426, AI926093, AC009086.5, |
| | | | | | AC003007.1, AF001549.1, AC004638.1, AC018868.4, AC008747.5, AC090527.3, AL050318.13, |
| | | | | | AC078846.2, AC006254.10, AL035462.21, AL355476.12, AC026431.3, AC087091.1, AC005245.1, |
| | | | | | AL031311.1, AL136981.22, AL391241.21, AC010422.7, AC010267.6, AC011609.9, AC006538.1, |
| | | | | | AC006483.3, AL353807.18, AL049776.3, Z98200.8, AC067722.21, AC010913.9, AC008622.5, |
| | | | | | AC018828.3, AL080317.11, AC005484.2, AC022383.3, Z97989.1, AL117258.4, AC004531.1, |
| | | | | | AL121594.6, AL161656.20, AL122020.5, AL157372.18, AC067742.5, AL021453.1, AL390074.17, |
| | | | | | U47924.1, AC005077.5, AC002404.1, AC008482.5, AL035404.20, AL136124.10, AC005519.3, |
| | | | | | AL359983.7, AC005932.1, Z74739.1, AL034402.9, AC004813.2, AL136304.10, AC007386.3, |
| | | | | | AC022392.4, AL136979.16, AL031660.16, Z83844.5, AP000279.1, AC004975.2, AC011462.4, |
| | | | | | AL139809.16, AL450226.1, AC007193.1, AC008812.7, AC025588.1, AL445212.9, AL121890.34, |
| | | | | | AC011497.6, AC008752.6, AP000688.1, AC007216.2, AL356915.19, AP000106.1, AF207550.1, |
| | | | | | AC016742.10, AC005620.1, AC022384.4, U95742.1, AC004000.1, AL117381.32, AC011479.6, |
| | | | | | AC007285.3, AC008484.5, AC005755.1, AL157838.24, AC023790.21, AL162724.16, AC011487.5, |
| | | | | | AC000353.27, AL137077.31, AL031733.3, AL445490.6, AC025165.27, AC018711.4, AL354707.17, |
| | | | | | AC006251.3, AP000038.1, AL590763.1, AF129756.1, AP002852.3, AC005602.1, AC010170.3, |
| | | | | | AC005041.2, AL050302.2, AC005821.1, AC004846.2, AC003041.1, AL133238.3, AL031575.1, |
| | | | | | AC005257.1, AL137918.4, AC007163.3, AP000555.1, AL135905.6, AC020915.6, AP000047.1, |
| | | | | | AC025280.4, AL117330.6, AL135927.14, AC007227.3, AL049868.20, AL133367.4, AC007686.5, |
| | | | | | AC005365.1, AC006511.5, AL163203.2, AC020928.6, AC007298.17, AC009756.9, AC005666.1, |
| | | | | | AL359091.10, AC006515.7, AL139353.3, AL136170.12, AC009238.4, AL353804.22, U91323.1, |
| | | | | | AL160236.4, AL450224.1, AL159997.14, AP001724.1, AC006452.4, AL158830.17, AC004812.1, |
| | | | | | AC007751.3, AC004675.1, AL080243.21, AJ246003.1, AL354932.26, AC009488.5, AL391987.15, |
| | | | | | AP000213.1, AL354935.23, AL158813.16, AP000744.4, AC002543.1, AC010271.6, AL138878.10, |
| | | | | | AP000558.1, AC009144.5, AL020997.1, AC004913.2, AC008392.6, AL133246.2, AL161436.12, |
| | | | | | AC073073.2, AC012306.11, AC020914.7, AC090942.1, U52112.1, AL110115.38, AC004491.1, Z96074.4, |
| | | | | | AP000135.1, AC005410.2, AJ009616.3, AF165926.2, AL121886.22, AL109628.5, AL109743.4, |
| | | | | | AC008760.6, AL078477.5, AC004534.1, AL357052.15, AC006077.1, AC008745.6, Z98752.16, |
| | | | | | AP000692.1, AC009077.7, AP000031.1, Y18000.1, Z98051.6, AC002418.1, AC008687.4, AC005920.1, |
| | | | | | AC004234.1, AC012476.8, AL513043.7, L44140.1, AL136305.14, AC010605.4, AL022323.7, |
| | | | | | AC004825.2, AC013436.5, AL138752.5, AL132712.4, AL359092.14, AC018758.2, AC011510.7, AC004659.1, AC007597.3, |
| | | | | | AL353602.10, AL136039.4, AC008521.5, AL390738.4, AC020931.5. |
| HSNMC45 | 165 | 1352201 | 1-573 | 15-587 | AA377442. |
| HSQFP66 | 166 | 460537 | 1-463 | 15-477 | BE465277, BF593260, AI765036, BE181153, BE181155, AA834498, BF365438. |
| HSRFZ57 | 167 | 892171 | 1-1916 | 15-1930 | AC006159.3, AF125348.1, AC084730.2. |
| HSUBW09 | 168 | 413246 | 1-1007 | 15-1021 | AI991103, AI765351, AA703513, BF939824, AI925701, AW295389, AW976578, AI199421, AI422698, |
| | | | | | AI934983, BE501421, AI127932, AA703493, AW297092, AA677025, AA848037, AA814098, |
| | | | | | AW404152, AW904298, AW182186, AW197850, AA741121, AA651794, AI678148, AA906044, F18680, |
| | | | | | AA743764, AI632270, AW590435, BE045258, AA608892. |
| HSVBU91 | 169 | 596868 | 1-713 | 15-727 | AW839808, AA077633, BF919965, AC008171.3, AF041056.1, AC004089.25, AC005081.3, AC005015.2, |
| | | | | | AB006629.2. |
| HTAEE28 | 170 | 1018291 | 1-1327 | 15-1341 | AW195720, AI765273, AI817356, AI928166, AI283845, BE503396, AW081502, BE349083, BF059350, |
| | | | | | AA419437, AA758800, AW206944, AA933673, AW104261, AI627565, AI264565, AW469909, |
| | | | | | AA845240, AA332515, AL021453.1. |
| HTECC05 | 171 | 1352365 | 1-825 | 15-839 | AA437009, AI806582, AI040972, AA442839, AA759268, AI214390, AI799076, AA918443, AW195596, |
| | | | | | AA910234. |
| HTEEB42 | 172 | 206980 | 1-1008 | 15-1022 | AL522795, AA725566, AI421450, AL522796, AI199779, AA406389, AA912674, AW022835, AI952846, |
| | | | | | AI123727, BE218057, AW022646, N90730, BF846982, BF845761, AI652914, BF056970, AW020783, |
| | | | | | AI312805, AW393829, AI017553, AW393887, AW474261, AW264246, BF848293, AI366088, AI418268, |
| | | | | | T89217, AI052637, AW082343, BF221504, AW593293, AA865038, AI201753, BF091146, AI140139, |
| | | | | | AA987434, AA410345, BF846977, BF846980, AW900593, BF932982, BF932991, AW865421, |
| | | | | | AW136481, AI650503, AI432092, T89127, AA974715, AW261924, BE938414, AF255910.1, AY016009.1, AP001694.1, |
| | | | | | AP000087.1, AP000225.1, AP000226.1, AP000086.1, AP000223.1. |
| HTEFU65 | 173 | 543396 | 1-1014 | 15-1028 | AW072387, R83559, AI924465, AI364031, AW513660, BF361111, AA705541, AL162032.1. |
| HTELP17 | 174 | 836072 | 1-794 | 15-808 | AW976593, AW275003, BF103848, AA744857, AI458735, AW013800, AA453589, AI684921, AI184517, |
| | | | | | AI376535, AA621297, AI970221, AW015543, AA969112, AA992291, AA442130, W01308, H72782, |
| | | | | | AL519628, AA129060, AA460996, AA721433, BF665557, BE170715, AA460649, BG035897, H72781, |
| | | | | | AI382100, BF541499, AW800324, AI806305, BF885871, AI868710, AI241242, BE386136, AV723953, |
| | | | | | R75918, N75771, AI865320, AI355277, AI500061, AW088944, AI491842, BE544111, AI866469, |
| | | | | | AW007955, AI800464, AI335426, AI348777, BE891834, BG179438, AW409772, AL037582, AL037602, |
| | | | | | AV758017, AV712838, AV713988, AI536563, H42557, AV713143, AV755673, AV702147, AI174799, |
| | | | | | BE881061, BF814357, BF797305, AV721644, AI345010, AW021717, BG029829, BF793891, BF909758, |
| | | | | | AI538817, AW827289, AL037454, AW025279, AA766104, AV717730, AI817523, AL046942, |
| | | | | | BG001293, BF969354, AI554818, BE887537, AI583032, AI473536, BE789373, AI582932, AI590043, |
| | | | | | AV714010, AV717397, BG121959, AV706915, AV706624, AW027374, AA744531, AV703585, |
| | | | | | BF924856, AI819545, BE883591, AW196078, AI811631, AL036705, AI929108, BF997967, AI345745, |
| | | | | | BF921291, BE964497, AI279925, AI873638, BG029053, AI923989, AI288152, AI305745, AI539800, |
| | | | | | BF816685, AI567582, AL040694, BF751288, BG166654, AL039276, AW090102, AI440238, AW161202, |
| | | | | | AI309306, AI401697, AI679959, AI345131, AL118781, AW078818, AI628325, AI697324, AI471429, |
| | | | | | T69241, AI470293, AI687568, BG033723, BF826429, AW965840, AA603709, AI371786, AI376748, |
| | | | | | AL043355, AI499986, BG032919, AI866770, BF924855, AW827211, AW059713, BG107590, AI125884, |
| | | | | | AI866465, BF092710, BE612681, AV750565, AI452707, AI446721, AI912438, AI288335, AI371243, |
| | | | | | AW020425, AI568138, AV682249, AV763927, AI972112, BG164558, BF811802, AW020397, |
| | | | | | AV713908, AW160905, AV681643, AW150826, AI864102, BG031447, AW193467, BG171892, AW162189, |
| | | | | | AI345415, AA514684, BE927769, AW059765, AL039274, AV648334, BF792047, BF970768, AI866780, |
| | | | | | AI570140, AI648663, AI363957, BF341210, BF792781, BG253033, AI890887, |
| | | | | | AL045626, BE957870, AI560679, AI434969, AL110306, AI561228, AA652505, AW172723, AI802244, |
| | | | | | AW022494, BE536058, AV705066, BF904265, AW410430, BF752997, AW183130, N81164, AI954293, |
| | | | | | AL120254, AW163464, BG112644, AW021662, AI571000, BG165979, AI927256, AI250852, AV682289, |
| | | | | | BF812963, AI336575, AL040241, AV682300, AI799364, AI445620, AL040449, AI656270, BF337602, |
| | | | | | BE965724, BF814412, BG260037, AA806719, AW264895, BE964614, BF904180, BF032768, |
| | | | | | AW151132, BE965432, AI474646, AW089664, AI653769, AW089275, AW020095, AI434656, Z99428, |
| | | | | | AW834325, AI923833, AI285419, BG122101, AC000077.2, AK026885.1, BC008365.1, AK024570.1, |
| | | | | | AB063093.1, Y14040.1, X82434.1, AL136748.1, AF078844.1, AF073483.1, AF285836.1, AL050092.1, |
| | | | | | AK025958.1, AK025414.1, AK025435.1, AL122118.1, BC003591.1, AF218006.1, AK026613.1, |
| | | | | | AF218023.1, BC007522.1, BC003410.1, BC007534.1, AF090901.1, AL133072.1, AL136882.1, |
| | | | | | AK026583.1, BC004310.1, AB062978.1, AK025407.1, AL389935.1, AL136884.1, AL512719.1, |
| | | | | | AL359596.1, AB056420.1, AF090903.1, AK026556.1, Z82022.1, AL110280.1, D83032.1, AB055805.1, |
| | | | | | AL137283.1, AB060826.1, AF262032.1, AL133049.1, AK026608.1, BC001328.1, AK027164.1, |
| | | | | | AL049283.1, AL122050.1, AK026522.1, AL137533.1, AL136864.1, S76508.1, AK024545.1, BC008785.1, |
| | | | | | BC002750.1, BC005890.1, AK024944.1, AL133665.1, AK025099.1, AF155827.1, BC008455.1, |
| | | | | | BC003120.1, BC003573.1, AL162008.1, BC001785.1, AK025906.1, BC006164.1, AF225424.1, |
| | | | | | AK025209.1, AK026762.1, BC001964.1, AL122100.1, AB056372.1, Y14314.1, AK026038.1, |
| | | | | | AK026534.1, AL133081.1, BC000316.1, AK026630.1, AK025410.1, AF252872.1, BC003122.1, |
| | | | | | BC005070.1, AL137479.1, BC006807.1, AL162002.1, AL080074.1, AK026784.1, AK027160.1, |
| | | | | | AB055303.1, AB060887.1, AL136766.1, AK026464.1, BC006408.1, BC006159.1, AL353802.14, |
| | | | | | AL117460.1, AL117649.1, AK026649.1, AF044323.1, S77771.1, AK024538.1, BC008196.1, AL133067.1, |
| | | | | | BC003683.1, BC008649.1, AK026528.1, BC008416.1, AB048913.1, AL049382.1, AK027173.1, |
| | | | | | AK026797.1, AK027146.1, AK000421.1, AB050431.1, AK025524.1, AL137488.1, U88966.1, |
| | | | | | BC002777.1, AK026462.1, BC002688.1, Y16645.1, AL050024.1, Y10936.1, AK026642.1, AK025084.1, |
| | | | | | AK000083.1, AB052191.1, AB055368.1, BC006525.1, AF081571.1, AK027111.1, S61953.1, AF090934.1, |
| | | | | | BC008387.1, AL136615.1, BC008284.1, AL136786.1, BC004530.1, AF110640.1, AF159615.1, |
| | | | | | AF106697.1, AB063079.1, AL512689.1, BC003590.1, AL157482.1, AL050393.1, AL136540.1, |
| | | | | | AK027113.1, BC004883.1, AK026480.1, AF177336.1, BC008723.1, AL136789.1, AL133062.1, U72621.3, |
| | | | | | BC004960.1, AB049849.1, AL136640.1, AB047623.1, AK024747.1, BC002409.1, AK025375.1, |
| | | | | | AF232009.1, AF217987.1, AK025092.1, AK025491.1, AL080162.1, BC003548.1, BC002473.1, |
| | | | | | AK000647.1, BC002844.1, AY033593.1, AL137480.1, AK026506.1, AL162004.1, AK024546.1, |
| | | | | | BC007499.1, BC005002.1, BC008673.1, AL512718.1, AB060897.1, AK027161.1, AF202636.1, |
| | | | | | BC000090.1, AF061795.1, AK026452.1, AF151685.1, AL136754.1, BC003684.1, AF260566.1, |
| | | | | | AK000391.1, AL353956.1, AL136586.1, BC005997.1, AL136784.1, AL133560.1, AK026408.1, |
| | | | | | BC007053.1, AK024588.1, AK027096.1, BC006091.1, AL357195.1, AF218014.1, AK025857.1, |
| | | | | | AB060879.1, AK026749.1, AK000257.1, BC007680.1, AL137558.1, AL583915.1, AL117432.1, |
| | | | | | AL389982.1, S78214.1, AK024992.1, AB051158.1, AL389939.1, BC003614.1, AJ299431.1, AK027082.1, |
| | | | | | BC002357.1, AF141289.1, AK026947.1, AB048954.1, AB048975.1, AL110221.1, AL096744.1, |
| | | | | | AB060914.1, AK026631.1, AK026542.1, BC007326.1, AB050407.1, AL136850.1, AB060893.1, |
| | | | | | AF132676.1, AB060873.1, AF061836.1, AL117583.1, AL137648.1, AL512733.1, AL390184.1, AL137711.1, AB060888.1, |
| | | | | | AL110158.1, AF090900.1, AF274348.1, AF036268.1, AF274347.1. |
| HTELS08 | 175 | 847090 | 1-1884 | 15-1898 | AW664990, AA608835, BE972717, AA383680, AW572898, AI028204, AI554902, AI138881. |
| HTLEP53 | 176 | 634852 | 1-804 | 15-818 | BF876683, AI755202, AI066646, AW613805, AA084609, AW769151, BE169870, AA601674, AI561210, |
| | | | | | BF926568, AW265614, BF826830, AI613389, AL042667, AL042670, AW130427, BF868994, |
| | | | | | AW471092, AV760019, AW576485, AI281818, AA225956, N64587, AU157209, BF941382, AI340151, |
| | | | | | AI859834, AW328202, AV754716, AW501278, BG222269, AI955029, AL134440, AI799569, BG250286, |
| | | | | | AW518030, AW576437, BF725884, BE396138, AW974363, T05118, AA524616, AI732682, AW268329, |
| | | | | | AI192440, AA669741, AW166920, D58782, AI653493, AW238341, BE301068, AI955718, BF923179, |
| | | | | | BF526964, AW438850, AW438662, U95742.1, AC019205.4, AC027125.4, AL356299.16, AC007216.2, |
| | | | | | AC008649.6, AC005484.2, AC005098.2, AC005740.1, AB020868.1, AC008569.6, AL359091.10, |
| | | | | | AL136527.9, AC005527.3, AC005000.2, AC005529.7, AL121809.6, AC090883.1, AC006312.8, |
| | | | | | AC004166.12, AF250325.1, AL008726.3, AL139396.17, AC010913.9, Z85987.13, AL590762.1, |
| | | | | | AL121658.2, AJ246003.1, AP001781.4, AP001694.1, AC004867.5, AL133312.3, AL513550.9, |
| | | | | | AC008507.8, AL022476.2, AC005520.2, AC068533.7, AL160163.24, AC011485.6, AF111167.2, |
| | | | | | AC002544.1, AC004702.1, AL158141.14, AC005071.2, AC007191.1, AC005229.1, AL357515.26, |
| | | | | | AC010412.7, AL161670.4, AF196972.1, AL135927.14, AC007227.3, AC083884.6, AC004089.25, |
| | | | | | AL445483.13, AF165926.2, AC009060.7, AL359235.3, AC002350.1, AC005952.1, AC007052.4, |
| | | | | | AC020558.4, AL035071.17, AP000510.2, AC007731.14, AL121586.31, AL354815.10, AC005500.2, |
| | | | | | AC006014.2, AC005015.2, AL161893.24, AC005726.1, AC004985.2, AL161725.13, AC002390.1, |
| | | | | | AL450265.11, AL353135.32, AL160231.4, AC026672.44, AC004466.1, AC060231.6, AL360227.17, |
| | | | | | AL117382.28, AL021397.1, AC083863.2, AC011487.5, AL158824.11, AC018638.5, AL031283.26, |
| | | | | | AL121761.5, AC004242.1, AL020993.1, AL512641.9, AL121936.17, AC005280.3, AL035587.5, |
| | | | | | AC020916.7, AC067941.7, AC009812.17, AC012476.8, AL136228.8, AP001728.1, AL354808.24, |
| | | | | | AL049561.16, AL352984.4, AP000046.1, AC010378.6, AC000381.1, AC006480.3, AC006023.2, |
| | | | | | AL050308.9, AC005531.1, AL049776.3, AP000114.1, AC008551.5, AL031680.20, AL391827.18, |
| | | | | | AP001360.4, AL354707.17, AF111168.2, AL031683.2, U89337.1, AC010605.4, AL035367.5, |
| | | | | | AC002546.1, AL138724.12, AL033521.2, AC020906.6, AC078846.2, AC006452.4, AC007003.4, |
| | | | | | AC009244.24, AL049547.10, AL163279.2, AF064861.1, AC000025.2, AC027319.5, AL391280.15, |
| | | | | | AC008083.23, AC004253.1, AC008598.5, Y10196.1, AL049766.14, AL512666.6, AL138784.30, |
| | | | | | AC008891.7, AC004840.3, AC083873.3, AC005377.2, AC000360.35, AL049637.43, AL512378.7, |
| | | | | | AC008753.8, AC005488.2, AF001548.1, AC010422.7, AC009179.17, AC008623.4, AC004876.2, |
| | | | | | AP001717.1, AP001709.1, AC011465.4, AP000901.5, AL160471.5, AC006329.5, AL034405.16, |
| | | | | | AC008521.5, L44140.1, AC008481.7, U15177.1, AL162578.13, AC006449.19, Z97876.1, AC016830.5, |
| | | | | | AC008946.6, AL137792.11, AL109743.4, Z83844.5, AL049631.7, AC025275.4, AC091736.1, |
| | | | | | AP002453.3, AC006512.12, AC004491.1, AL356095.11, AC005291.1, AL136297.3, AC003982.1, |
| | | | | | AL022318.2, AC009086.5, AC005736.1, AC004824.3, Z84466.1, AP001670.1, AL157823.9, AC018904.6, |
| | | | | | AC002425.1, AF312032.1, AL109806.22, AL035413.19, AC006027.1, Z84469.1, AL513366.11, |
| | | | | | AC011737.10, AF196779.1, AC026756.15, AC008745.6, AC090527.3, AC006038.2, AC005318.1, |
| | | | | | AL391137.11, AC010543.8, AC005081.3, AC005522.2, AC005231.2, AC013726.7, AL109804.41, |
| | | | | | AC005399.19, AC004832.3, AC022148.5, AF134726.1, AC022007.3, AP002851.2, AL136084.11, |
| | | | | | AL031295.1, AP001748.1, AL121834.20, AC007686.5, AL049872.3, AL049569.13, AC016993.4, |
| | | | | | AC004805.1, AL133551.13, AL136966.27, AC004167.1, AP000237.1, AL117186.3, AL161747.5, AC005288.1, X54156.1, |
| | | | | | U94788.1, Z99127.1, AC016691.10, AC016025.12, AC010526.7, AC004890.2. |
| HTPCS72 | 177 | 854941 | 1-3421 | 15-3435 | AV716024, BF032601, BE884480, BG107409, BE896847, AA534380, BF996760, BE935961, AA625472, |
| | | | | | BF593809, AI275974, AA758011, AI091865, AA770655, AA826573, AA642458, AA284480, AA308157, |
| | | | | | BF316735, AA150509, AI338707, H98214, AI085686, AI613457, AW007656, BE677803, BE092569, |
| | | | | | AW083271, BF890758, AA156713, BF315290, BF687549, AI079204, R38877, AI561066, AW629504, |
| | | | | | Z44870, AI638057, AA468549, BF445676, AW771735, BF852685, AW173317, BF882397, BE092420, |
| | | | | | AA368918, AW969242, AI254739, T80580, AA406249, F07793, R55262, R12721, BE832360, R55263, |
| | | | | | AW900776, BF357645, F05814, Z40638, F04054, AA321781, AW021358, AA714089, BF886411, |
| | | | | | BE149465, H91564, AA954780, BF871030, AI640665, BF036620, F02061, AA243079, BF307290, |
| | | | | | BF835491, BE774931, H90643, N44003, AA307326, AW135695, BE927559, AA242996, BF757045, |
| | | | | | AW999558, AI002239, BE567146, D19832, AW672798, BF089866, W73266, AF017388, BE932984, |
| | | | | | BE832354, BE707285, AB040946.1, AL008639.15, AF139898.1, AK027079.1, AF131746.1. |
| HTPIH83 | 178 | 919916 | 1-1467 | 15-1481 | BE513091, BE304667, BG164062, AW385836, AW837727, AW837724, BF032123, BF541534, |
| | | | | | AW006504, AI769564, AW837723, AA552647, AW015998, AI343787, AI285131, AA976345, BE048787, |
| | | | | | AI949846, AI685788, AI953481, AW083920, BF819923, AI262767, AW194732, AA345449, AA639438, |
| | | | | | T86266, AI469683, AI244378, AI659323, T86158, BF758311, BG164241, AI932964, AV647382, |
| | | | | | BF104997, AI913916, AF177340.1, AL158821.16, AF250558.1. |
| HTSEW17 | 179 | 460579 | 1-638 | 15-652 | AA779073, AI860913, AI028060, AI024955, BE549714, AW136463, R07163, AW612172, BF773051, |
| | | | | | AF007146.1, AF381980.1. |
| HTTBI76 | 180 | 637725 | 1-1697 | 15-1711 | AA059411, BE568135, BE856883, BF435859, BF977217, AV701624, BE566398, BE856637, AA429722, |
| | | | | | BE564953, BE568948, BF214557, AA196423, AW237471, AA716665, AI377511, AA193289, N51319, |
| | | | | | BF248318, AI796263, AI770155, AA045194, BE380112, BF029088, AI185077, AA442760, BF214729, |
| | | | | | BE865742, AA810811, AI572127, AI494075, BE777718, AA128609, AA933879, BF027898, BF691014, |
| | | | | | BF977570, AV702879, AA421072, N63065, BE866018, AI373224, R99289, BG003427, BE568709, |
| | | | | | AA919169, AI580336, AW024454, BF057794, AA731146, AA128610, BF105164, AA062583, BF031391, |
| | | | | | BE866602, BF238619, AI758175, AA045378, D61992, BF211153, R99375, AA420992, AA194235, |
| | | | | | AA976350, AW135598, AI648675, BF436083, BE392607, AA383499, BF368270, AA878813, AA877180, |
| | | | | | BE379677, AI219249, AA846496, AV760348, AA380012, BE866426, AA453722, BF687711, BF213063, |
| | | | | | H84990, H86604, H86921, AL519369, AA383353, BE742087, AA007586, T85467, BE514581, BF573588, |
| | | | | | BF028113, AL521923, BF091941, BE548812, AI244008, H55168, AA379174, BE621508, AI200967, BF346162, AL137861.5, |
| | | | | | AC005690.8, AF277188.1. |
| HTTBS64 | 181 | 1008159 | 1-2044 | 15-2058 | AW801486, AL157701.2, AC006356.3, AC079033.12, AC025159.28, AL360078.16, AF002997.2, |
| | | | | | AL034428.4, AP001693.1, AL049873.3, Z83819.1, AL389889.11, AP001669.1, AL035552.9, |
| | | | | | AL590043.7, AC005406.2, AC009069.3, AC048346.13, AL354937.12, AL050401.5, AL136324.6, |
| | | | | | AL390800.4, AC073941.5, AP001597.1, AC012464.24, AC008277.4, AL121985.13, AC004988.2, |
| | | | | | AL359085.14, AC016623.5, AL163213.2, AL359850.7, AL357894.6, AL133247.1, AF003528.1, |
| | | | | | AC090946.1, AL021877.1, AL157779.6, AL137245.11, AC008250.23, AL031391.1, AL355530.6, |
| | | | | | AL589740.4, AL354750.12, AC002076.1, AL139090.11, AL354896.16, AC021863.5, AL121577.1, |
| | | | | | AL049732.11, AC012003.9, AL117259.6, AC010144.4, AC068061.5, AC068800.28, AL512452.7, |
| | | | | | AC010142.4, AC026691.4, AL354802.15, AL359252.17, AL512662.8, AC008506.7, AL022718.1, |
| | | | | | AC008462.6, AL356499.16, AL359332.2, AC019196.10, AL138479.4, AL137061.12, AP001331.1, |
| | | | | | AC019179.4, AL450333.13, AF003529.1, AL133444.4, AC034195.6, Z98753.1, AL161630.12, |
| | | | | | AL359273.11, AC005799.1, AL390247.11, AL392087.7, AL078594.36, AL139087.13, AL359999.11, |
| | | | | | AC004216.1, AC007543.4, AL033522.1, Z99571.1, AC012405.5, AL390959.12, AL160236.4, |
| | | | | | AL138773.4, AC079457.14, AC007158.10, AL359636.17, AC006979.2, AC002302.1, AL445687.5, |
| | | | | | AC005873.3, AC023095.7, AL136100.12, AC007214.13, AL162500.15, AC004160.1, AP001533.4, |
| | | | | | U82828.1, AC073273.9, AL034369.1, AL445985.10, AC006351.3, AC002065.1, AC022081.32, |
| | | | | | AL158053.14, AC010591.8, AC005284.1, AL355578.4, AC010534.7, AC005249.1, AC009466.17. |
| HTXJM03 | 182 | 603918 | 1-2384 | 15-2398 | AL518347, BE742019, AI114655, BF514929, AL118845, BF880731, AA236989, AI140989, AW813468, |
| | | | | | BE841331, AW582445, AA252594, AA618239, AI823453, AI280443, BF988837, AL042692, BF989072, |
| | | | | | H15090, AW391644, BG011632, H15570, Z43079, H15630, AW813319, H22799, Z39170, AA252414, |
| | | | | | F07601, F11156, F05157, AA746494, H15091, F08825, W68008, AW813329, F03848, F01404, |
| | | | | | AA804351, AC005829.1, AB033093.1, BC006271.1. |
| HTXON32 | 183 | 838288 | 1-1491 | 15-1505 | AA746911, AA410788, AA704393, AA181917, BG222813, BE301584, AA683069, AA507822, |
| | | | | | AI056177, AA228778, AA084609, BE178231, BE178064, AI678867, AU147162, AV747362, AI857836, |
| | | | | | BF821968, AI754170, AW769654, AA825827, AA468975, AW513071, AW328202, AW069412, |
| | | | | | BF950533, AI962030, AI188049, BG250286, AI915075, BG222564, BG222326, AV733824, AV759632, |
| | | | | | AA584862, BE246405, AK000114.1, AL035088.1, AC003691.1, AP001359.4, AC004605.1, Z94056.1, |
| | | | | | AC010422.7, AC004125.1, AC012157.20, AC007912.6, AC005368.1, AL031257.1, AL354680.14, |
| | | | | | AC079353.5, AF130417.4, AC005011.2, AP001672.1, AC005255.1, AL445071.14, AL354977.10, |
| | | | | | AC006013.3, AP000851.4, AC008945.6, AC003689.1, AC002288.1, AC006211.1, AP002751.3, |
| | | | | | AL133391.5, Z98200.8, AF001905.1, AC006597.2, AC012450.9, AC005840.2, AC008699.5, AC007934.7, |
| | | | | | AC002422.1, AP000347.1, AL162831.5, AC009408.3, AC026191.3, AL136992.22, AC007436.1, |
| | | | | | AL590381.4, AC008840.4, AL008721.1, AC005841.3, AC021325.5, AL451061.8, AL117382.28, |
| | | | | | AC008511.6, AC004846.2, AL355365.10, AC004531.1, AC007652.1, AP001972.4, AP001727.1, |
| | | | | | AC087237.14, AC010465.7, AL157877.11, AL355984.11, AC010601.5, AL356095.11, AC004916.2, |
| | | | | | AC008264.10, AC025457.5, AP001561.4, AP000008.1, AC018719.4, AC007773.1, AC009094.7, |
| | | | | | AC010234.5, AC011890.4, AL355812.23, AC025471.5, AC020913.6, AP000704.2, AL135905.6, |
| | | | | | AC021863.5, AC022087.8, AC004659.1, AL022329.9, AC027342.4, AC019212.4, AC017100.4, AC020928.6, |
| | | | | | AC004104.1, AC019184.3, AL160274.9, AL161899.21, Z82194.1, AC026811.4, |
| | | | | | AC015842.9, AC002420.1, AL035079.14, AL390239.16, AC008012.8, AP001691.1, AL138819.9, |
| | | | | | AC009142.10, AL512449.6, AC024028.10, AC079408.25, AC005015.2, AL451126.18, AF011889.1, |
| | | | | | AL032821.2, AC004999.1, AF131216.1, AL109963.4, AL021939.1, AC008474.7, AC004089.25, |
| | | | | | AL391666.5, AL353135.32, AC005081.3, AF001551.1, AL096699.11, AC012312.8, AL031657.5, |
| | | | | | AL158832.13, AC006030.2, AL355336.15, AL050320.19, AC002553.1, AC005480.3, AF017104.1, |
| | | | | | AP001825.4, AC009779.18, AC016554.7, AC037433.6, AL033519.42, AC006313.1, AC019050.4, |
| | | | | | AL109623.9, AC012150.16, AL138749.13, AP000067.1, AL132994.4, AC004491.1, AC007993.15, |
| | | | | | AC025165.27, AF196970.1, AL157817.13, AC002377.1, AP000495.1, AB020869.1, AC009224.6, |
| | | | | | AC010582.6, AL160397.17, AL136040.5, AC068513.7, AL133173.19, AC004057.1, AC004616.1, |
| | | | | | AL353777.18, AP003473.2, AC008958.6, Z97635.10, AC073057.6, AC008427.7, AL137790.4, |
| | | | | | AC006316.2, AC005537.2, AC067941.7, AL035604.15, AC004021.1, AL035462.21, Z84480.1, |
| | | | | | AC003009.1, AC016778.3, AL355312.24, AC005746.1, AC005768.17, AC003690.1, Z97054.1, |
| | | | | | AP000577.4, AC069292.12, AL138696.16, AL354799.12, AL158828.14. |
| HUFCJ30 | 184 | 638402 | 1-854 | 15-868 | AL533274, AI741266, AA194264, BF438670, BE855763, AI912191, BF109379, AI815187, AA521107, |
| | | | | | BE646628, AI911233, AA828445, AA429411, AI912933, AI423970, AI242299, BE042993, AW276617, |
| | | | | | AA905840, AA464614, AI394374, AW340805, AI096492, AI221797, AW129415, AI554269, AW969178, |
| | | | | | BG055418, AW029033, AW044596, AA582358, BE882568, AI870051, AA233165, AI933519, AI370473, |
| | | | | | BE676140, AW292630, AA429458, F03916, AA233241, F03174, AA193481, H61820, AA193313, |
| | | | | | AW080606, AL533316, AA442046, AW975876, AW971403, AW974801, AW976024, AW975037, |
| | | | | | AW971975, AW972292, AW975965, AW975031, AW975002, AW971404, AW975019, AW975952, |
| | | | | | AW979127, AW974786, AW975105, AW975032, AW974964, AW979238, AW971968, AW975930, |
| | | | | | AW975954, AW969673, AW979090, AW975154, AW979002, AW969727, AW976023, AW975434, |
| | | | | | AW979204, AW969680, AW969643, AW974806, AW979098, AW975942, AW975971, AW973213, |
| | | | | | AW979176, AW973717, AW971326, AW974658, AW973219, AW969885, AW974338, AW971375, |
| | | | | | AW974998, AW975981, AW979208, AW970969, AW975149, AW979169, AW974975, AW975027, |
| | | | | | AW971732, AW970936, AW974802, AW974823, AW970942, AW975028, AW972377, AW973270, |
| | | | | | AW970010, AW972296, AW973185, AW975020, AW975632, AW969839, AW973750, AW973819, |
| | | | | | AW969816, AW976511, AW979294, AW979106, AW976031, AW975966, AW975058, AW975015, |
| | | | | | AW979212, AW976982, AW971378, AW976000, AW969852, AW979220, AW975585, AW979219, |
| | | | | | AW973209, AW974785, AW975692, AW972680, AW974101, AW973967, AW974971, AW972880, |
| | | | | | AW970962, AW972817, AW969861, AW973785, AW975025, AW975022, AW975649, AW973252, |
| | | | | | AW975959, AW973812, AW976506, AW979076, AW969637, AW972440, AW972154, AW971254, |
| | | | | | AW970889, AW979232, AW971305, AW979142, AW975230, AW973821, AW975899, AW972774, |
| | | | | | AW975167, AW972226, AW972660, AW973814, AW973775, AW973217, AW969768, AW975896, |
| | | | | | AW973779, AW976003, AW979054, AW975941, AW973211, AW969874, AW970113, AW972884, |
| | | | | | AW973189, AW973202, AW972695, AW973805, AW972719, AW976515, AW975976, AW979165, |
| | | | | | AW976510, AW971954, AW975975, AW969884, AW972943, AW969759, AW979083, BF592735, AW970587, AW973650, |
| | | | | | AW979175, AW969931, AW973986, AW979064, AW975938, AL359608.1. |
| HUVEB53 | 185 | 571200 | 1-1488 | 15-1502 | BE786669, AA453165, BG027754, AI694207, AW751021, BE140357, BE140309, BF673837, AI827679, |
| | | | | | AI597942, AI831626, BF572868, AW131344, AV726756, BE844218, BE162515, AA188243, AW188015, |
| | | | | | AW044629, AA877403, AI127993, BF691063, AA989288, AA453945, AA191206, AV748508, |
| | | | | | AA481849, AA405313, BF670519, AI167809, AA431686, AA846755, AI041097, AA305896, BE844200, |
| | | | | | BE844214, AI160824, H13901, AA655009, R68945, W26226, AA861877, AW974213, H11654, |
| | | | | | AW953548, AA453440, AI587514, AI076451, AA405350, H04206, AW751099, AA855040, AA974088, |
| | | | | | H43741, Z33442, AA825311, AA036965, AA188839, BE844205, H04207, AA923377, AA903946, |
| | | | | | AV693909, BE968480, AA761680, AV724398, AV724896, AA352991, AA330417, AA887483, D57665, |
| | | | | | N51756, AA206627, D61904, BF440004, AI248842, H58383, AA975213, D79380, AA205353, BE785631, |
| | | | | | AA344562, AA864363, D61991, BE467097, AA773771, AA649813, AW592162, AA642834, D79365, |
| | | | | | N47004, AW900901, AA036966, D61899, D58112, AA579902, AA865874, AA722600, R68832, R40852, |
| | | | | | H45338, BF131609, AA007516, H13852, AI828027, AA431480, BE149422, AV686924, AW074757, D20526, AB032988.1, |
| | | | | | AL021396.8. |
| HWAAD63 | 186 | 838626 | 1-3294 | 15-3308 | BG058664, AW953071, BF668217, AL046409, AI284640, AW406162, BF852604, AU123691, |
| | | | | | AL046205, AW303196, D82290, AW301350, AI334443, AV761286, AL121235, AW274349, AW600804, |
| | | | | | BF339640, BF677892, AV763892, BG032943, AI572924, AI801482, AI431303, AL044940, AV740801, |
| | | | | | AV764490, BG249643, AV762098, AI270117, AW969629, AI732378, AW265385, AI963720, AI708009, |
| | | | | | AI350211, AU147104, AW473163, AA669840, AV735495, AI149478, AV763971, AA581903, |
| | | | | | AV759518, AV760937, AI754955, AL041690, AI583283, AV710066, AV763550, BG236735, AU145314, |
| | | | | | AW502975, AV742057, BG167743, BF940837, AW193265, AV760777, BF914859, BF918590, |
| | | | | | AF074667, AV763122, BF918640, BE908796, BG036337, AW513362, AA491814, AV759362, |
| | | | | | BF725315, AV762050, AV763354, AW021583, BF919090, AI203955, AA531580, AA613232, |
| | | | | | AA490183, D82542, AW576391, AI623720, AV739452, AV728425, BE350475, AW500125, AA521323, |
| | | | | | AA665330, AV702857, AV730391, BF347791, AA610491, T40452, AA584167, AW474160, AI613280, |
| | | | | | AV762139, BE253048, AI192631, AI732865, AW020992, AA938105, AV733830, AF074677, AV652936, |
| | | | | | AW276817, BE872393, AW088846, AW438643, AI434695, AI345654, AW270270, AI610159, |
| | | | | | AW274346, AW265170, BF680041, BF854876, AA469451, AI589230, AA584145, AW833862, |
| | | | | | BE047069, AI570261, BF347740, AI619997, AW264934, AL042420, BF475381, AW518220, BF942454, |
| | | | | | AV762009, AI708125, BF697673, AW148792, BE297262, AW731867, AV759505, AA457542, |
| | | | | | BF991286, BF806176, AV728410, AU159337, AW089322, BE164494, AA774222, AI345518, |
| | | | | | AW963497, AV763255, AI696962, AL041706, F36273, AA496508, AV764228, AA478355, AV713243, |
| | | | | | AV761613, BE677379, BF736198, BF916517, AW079135, AV735370, R99597, AA652764, AW029038, |
| | | | | | AV725423, AA410828, AW169517, BG250302, AV761786, BE393367, BF872630, AF063563, |
| | | | | | AV764241, AA601294, BF827410, BF812839, AL119691, AV760378, AA177061, BG177715, BF674620, |
| | | | | | AI298710, AW169151, AA502104, AI345681, AI345675, AA633798, AV761925, AA682912, BF965007, |
| | | | | | AV733710, BF680074, AV762768, AA579362, BE139146, BF217299, AV762111, AV764578, AL118559.6, AB038653.1, |
| | | | | | AC020904.6, AC009497.3, AC006581.16, AF001549.1, AC004638.1, |
| | | | | | AC008267.6, AL121601.13, AL109865.36, AL356915.19, AC018809.4, AL163973.1, AC023908.6, |
| | | | | | AC011465.4, AL160237.4, AP000459.3, AC005081.3, AC044797.5, AC009154.5, AP001760.1, |
| | | | | | AL035367.5, AC007298.17, AL139350.17, AC006329.5, AC004019.20, AC006038.2, AC011455.6, |
| | | | | | AC008616.6, AL354932.26, AC011461.4, AL161892.9, AC005911.6, AC008265.15, U80017.1, |
| | | | | | AP003357.2, U91323.1, AC018636.4, AC005562.1, AL096701.14, AL080243.21, AC011450.4, |
| | | | | | AL133367.4, AL162458.10, AL354720.14, AC020658.6, AL158830.17, AL050318.13, AC005839.1, |
| | | | | | AP001687.1, AC009144.5, AC005041.2, Z99495.1, AC002565.1, AC022007.3, AC018769.2, AP000031.1, |
| | | | | | AC008372.6, AC011811.42, AC008688.7, AC009298.3, AP000047.1, AL445222.9, AL163248.2, |
| | | | | | AL139113.21, AC006435.7, AL136219.17, AC011495.6, AC008562.4, AC022308.17, AC008537.5, |
| | | | | | AP001667.1, AL133399.1, AL353135.32, AL121809.6, AC005696.1, AC073838.6, AC002476.1, |
| | | | | | AC006028.3, AP000115.1, AL445928.8, Z69666.1, AC005522.2, AC084783.2, AL133485.3, |
| | | | | | AC016025.12, AC004906.3, AC008649.6, AP000553.1, AC009470.4, AL031054.1, AC007193.1, |
| | | | | | AP000338.2, AL117334.29, AC009530.5, AP001346.1, AL034380.26, AC016830.5, AC008403.6, |
| | | | | | AL049550.5, AC027644.9, AC011930.5, AL109965.34, AC006241.1, AL049869.6, Z83844.5, Z98941.1, |
| | | | | | AL031283.26, AL159191.4, AP000216.1, AC009996.7, AC015842.9, AL136295.3, AL139330.17, |
| | | | | | AC008745.6, AC005527.3, AC007731.14, U47924.1, AC012377.5, AC025212.5, AC005500.2, |
| | | | | | AC018751.30, Z93241.11, AL078638.9, AL354993.24, AC016769.10, AC005324.1, AL355517.12, |
| | | | | | AC074121.16, AC012170.6, AC006538.1, AP000962.2, AC004650.1, AC083884.6, AL354935.23, |
| | | | | | U52111.2, AC016027.15, AC079363.19, AP000113.1, AP000045.1, AL136123.19, AC007011.1, |
| | | | | | AL357150.7, AC008753.8, AL121675.36, AC002551.1, AL157838.24, AC009516.19, AC004865.1, |
| | | | | | AL139230.25, AC005529.7, AL050335.32, AC007216.2, AL049759.10, AP001716.1, AL021546.1, |
| | | | | | AC000360.35, AP001718.1, AE006639.1, AC025436.2, AL359091.10, AC004940.1, AC008101.15, |
| | | | | | AC003029.2, AL352978.6, AC020983.7, AL118520.26, AC007272.3, AC005154.1, AC078878.20, |
| | | | | | AL136980.5, AC005778.1, AC004971.3, AL033383.26, AC005921.3, AL159995.8, AC008068.4, |
| | | | | | AL008718.23, U95742.1, AC068712.6, AL024474.1, AC005031.1, AC017091.8, AC090514.1, |
| | | | | | AP001666.1, AL158040.13, AL161799.19, AL133387.8, AC003108.1, AC005808.1, AL109825.23, |
| | | | | | AC004033.3, Z98051.6, AC005295.1, AL353764.9, AC011236.8, AL132768.15, AC006285.11, Z99716.4, |
| | | | | | AL139396.17, AL096840.25, AL022098.1, AC005052.2, AC002300.1, AC007066.4, AL109797.18, |
| | | | | | AC004686.1, AL031662.26, AC008812.7, AL161656.20, AL136961.19, AC007404.4, AC020550.4, |
| | | | | | AJ003147.1, AP001858.4, AC021203.5, AC011559.3, AL117258.4, AC007620.30, AC010553.6, |
| | | | | | AP002028.1, AL356575.8, AP000299.1, AL121748.6, AL136300.22, AC016257.22, AC003684.1, |
| | | | | | AC004941.2, AL157406.19, AL049694.9, AL162853.17, U66059.1, AC026464.6, AL121972.17, |
| | | | | | AC013264.4, AL162426.20, AC006345.4, AC090960.1, AL049742.7, AC005037.2, AP000359.1, AC007051.3, AC018633.2, |
| | | | | | AL133174.15, AC008474.7, AC018635.6, AB023049.1, AC034198.6, AC022211.5. |
| HWADJ89 | 187 | 799506 | 1-1755 | 15-1769 | AW958273, AW377130, AW574767, AW138853, BF111962, AA135712, AA156931, AW264402, |
| | | | | | AW117200, AI684896, AW339989, AA524553, AI394626, AI754796, AI860485, AI989549, AW129957, |
| | | | | | AI672796, BG056354, AA040909, AI000898, AI421190, AI693729, AW512733, AW044450, AI090274, |
| | | | | | AW205364, AW081734, BE939287, N35410, AA788655, N55117, AA844145, AI091868, N62863, |
| | | | | | AW302517, AI361489, AI628038, AA765992, AI800010, AI817849, BF800164, AI285397, AW403436, |
| | | | | | AA658416, AA648845, F13408, N73777, AA983941, R34886, AI024148, T04873, AA310563, Z33435, |
| | | | | | R72500, AI219780, AI149773, BG248348, R49268, BE305119, BE293618, AI743430, AW440724, |
| | | | | | T78828, BE249965, F10993, BE250024, AI371489, BE171979, N77769, AW235832, AI204426, R34492, |
| | | | | | N48042, BF899137, BF842700, R34372, Z38685, N99398, AI857456, AW841803, BE176205, |
| | | | | | AW899803, AA665233, AI290874, AW591407, AI432644, BF757092, AI623302, AW968355, AI431347, |
| | | | | | AI432653, AW081103, AI431230, AI431328, AI432654, AI432655, AI431310, AI431312, AI432650, |
| | | | | | AI432677, AW968356, BE672759, AI431353, AW971740, AW972091, AW972093, AW968729, |
| | | | | | AI431307, AI431316, AI432661, AI431354, AI431315, AI431337, AI431257, AI492519, BE672745, |
| | | | | | BE672732, AI791349, AI432666, AI432675, AW128900, BE672748, AI431238, AI492520, BE672719, |
| | | | | | AI432651, AI432647, AI431330, AI432674, AI432672, BF448552, AW972092, BE672767, AI431243, |
| | | | | | AI431248, AI432665, AI432657, AI432658, AI432649, BE672644, AI431255, BE672774, BE672742, |
| | | | | | AW969229, AI431254, BF589777, AI431350, AI431231, AI432662, AI431345, BE672738, AI431357, |
| | | | | | AW858522, AI431241, AI431351, AI431323, AI431346, AI431247, AI431318, AI432676, AI432673, |
| | | | | | AI431235, AI431321, AW128897, AI431340, AI432643, BE672792, AW128846, AI432664, AI431246, |
| | | | | | AW972090, AI432645, AW128884, BE672743, AI492510, BE672640, AL042931, AI431314, AW129223, |
| | | | | | AI431308, BE672749, BE672744, AI492509, BE672622, AI431751, BE672627, AL042729, AL045494, |
| | | | | | AL042655, BE672626, AL042523, AL042519, AL042853, AL031296.1, AK026719.1, AB007922.2, AF052104.1, AF064854.1, |
| | | | | | AL133082.1. |
| HWBFX31 | 188 | 799427 | 1-1663 | 15-1677 | H93613, N75773, N22551, AA884923, AW873751, H93612, AC039057.8. |

[0172] Description of Table 4

[0173] Table 4 provides a key to the tissue/cell source identifier code disclosed in Table 1B.2, column 5. Column 1 of Table 4 provides the tissue/cell source identifier code disclosed in Table 1B.2, Column 5. Columns 2-5 provide a description of the tissue or cell source. Note that “Description” and “Tissue” sources (i.e. columns 2 and 3) having the prefix “a_” indicates organs, tissues, or cells derived from “adult” sources. Codes corresponding to diseased tissues are indicated in column 6 with the word “disease.” The use of the word “disease” in column 6 is non-limiting. The tissue or cell source may be specific (e.g. a neoplasm), or may be disease-associated (e.g., a tissue sample from a normal portion of a diseased organ). Furthermore, tissues and/or cells lacking the “disease” designation may still be derived from sources directly or indirectly involved in a disease state or disorder, and therefore may have a further utility in that disease state or disorder. In numerous cases where the tissue/cell source is a library, column 7 identifies the vector use d to generate the library.

TABLE 4

| Code | Description | Tissue | Organ | Cell Line | Disease | Vector |
|---|---|---|---|---|---|---|
| AR022 | a_Heart | a_Heart | | | | |
| AR023 | a_Liver | a_Liver | | | | |
| AR024 | a_mammary gland | a_mammary gland | | | | |
| AR025 | a_Prostate | a_Prostate | | | | |
| AR026 | a_small intestine | a_small intestine | | | | |
| AR027 | a_Stomach | a_Stomach | | | | |
| AR028 | Blood B cells | Blood B cells | | | | |
| AR029 | Blood B cells activated | Blood B cells activated | | | | |
| AR030 | Blood B cells resting | Blood B cells resting | | | | |
| AR031 | Blood T cells activated | Blood T cells activated | | | | |
| AR032 | Blood T cells resting | Blood T cells resting | | | | |
| AR033 | brain | brain | | | | |
| AR034 | breast | breast | | | | |
| AR035 | breast cancer | breast cancer | | | | |
| AR036 | Cell Line CAOV3 | Cell Line CAOV3 | | | | |
| AR037 | cell line PA-1 | cell line PA-1 | | | | |
| AR038 | cell line transformed | cell line transformed | | | | |
| AR039 | colon | colon | | | | |
| AR040 | colon (9808co65R) | colon (9808co65R) | | | | |
| AR041 | colon (9809co15) | colon (9809co15) | | | | |
| AR042 | colon cancer | colon cancer | | | | |
| AR043 | colon cancer (9808co64R) | colon cancer (9808co64R) | | | | |
| AR044 | colon cancer 9809co14 | colon cancer 9809co14 | | | | |
| AR050 | Donor II B Cells 24 hrs | Donor II B Cells 24 hrs | | | | |
| AR051 | Donor II B Cells 72 hrs | Donor II B Cells 72 hrs | | | | |
| AR052 | Donor II B-Cells 24 hrs. | Donor II B-Cells 24 hrs. | | | | |
| AR053 | Donor II B-Cells 72 hrs | Donor II B-Cells 72 hrs | | | | |
| AR054 | Donor II Resting B Cells | Donor II Resting B Cells | | | | |
| AR055 | Heart | Heart | | | | |
| AR056 | Human Lung (clonetech) | Human Lung (clonetech) | | | | |
| AR057 | Human Mammary | Human Mammary (clontech) | | | | |
| | (clontech) | | | | | |
| AR058 | Human Thymus | Human Thymus (clonetech) | | | | |
| | (clonetech) | | | | | |
| AR059 | Jurkat (unstimulated) | Jurkat (unstimulated) | | | | |
| AR060 | Kidney | Kidney | | | | |
| AR061 | Liver | Liver | | | | |
| AR062 | Liver (Clontech) | Liver (Clontech) | | | | |
| AR063 | Lymphocytes chronic | Lymphocytes chronic | | | | |
| | lymphocytic leukaemia | lymphocytic leukaemia | | | | |
| AR064 | Lymphocytes diffuse | Lymphocytes diffuse large B | | | | |
| | large B cell lymphoma | cell lymphoma | | | | |
| AR065 | Lymphocytes follicular | Lymphocytes follicular | | | | |
| | lymphoma | lymphoma | | | | |
| AR066 | normal breast | normal breast | | | | |
| AR067 | Normal Ovarian | Normal Ovarian (4004901) | | | | |
| | (4004901) | | | | | |
| AR068 | Normal Ovary 9508G045 | Normal Ovary 9508G045 | | | | |
| AR069 | Normal Ovary 9701G208 | Normal Ovary 9701G208 | | | | |
| AR070 | Normal Ovary 9806G005 | Normal Ovary 9806G005 | | | | |
| AR071 | Ovarian Cancer | Ovarian Cancer | | | | |
| AR072 | Ovarian Cancer | Ovarian Cancer (9702G001) | | | | |
| | (9702G001) | | | | | |
| AR073 | Ovarian Cancer | Ovarian Cancer (9707G029) | | | | |
| | (9707G029) | | | | | |
| AR074 | Ovarian Cancer | Ovarian Cancer (9804G011) | | | | |
| | (9804G011) | | | | | |
| AR075 | Ovarian Cancer | Ovarian Cancer (9806G019) | | | | |
| | (9806G019) | | | | | |
| AR076 | Ovarian Cancer | Ovarian Cancer (9807G017) | | | | |
| | (9807G017) | | | | | |
| AR077 | Ovarian Cancer | Ovarian Cancer (9809G001) | | | | |
| | (9809G001) | | | | | |
| AR078 | ovarian cancer 15799 | ovarian cancer 15799 | | | | |
| AR079 | Ovarian Cancer | Ovarian Cancer 17717AID | | | | |
| | 17717AID | | | | | |
| LR080 | Ovarian Cancer | Ovarian Cancer 4004664B1 | | | | |
| | 4004664B1 | | | | | |
| AR081 | Ovarian Cancer | Ovarian Cancer 4005315A1 | | | | |
| | 4005315A1 | | | | | |
| AR082 | ovarian cancer 94127303 | ovarian cancer 94127303 | | | | |
| AR083 | Ovarian Cancer 96069304 | Ovarian Cancer 96069304 | | | | |
| AR084 | Ovarian Cancer | Ovarian Cancer 9707G029 | | | | |
| | 9707G029 | | | | | |
| AR085 | Ovarian Cancer | Ovarian Cancer 9807G045 | | | | |
| | 9807G045 | | | | | |
| AR086 | ovarian cancer 9809G001 | ovarian cancer 9809G001 | | | | |
| AR087 | Ovarian Cancer | Ovarian Cancer 9905C032RC | | | | |
| | 9905C032RC | | | | | |
| AR088 | Ovarian cancer 9907 C00 | Ovarian cancer 9907 C00 3rd | | | | |
| | 3rd | | | | | |
| AR089 | Prostate | Prostate | | | | |
| AR090 | Prostate (clonetech) | Prostate (clonetech) | | | | |
| AR091 | prostate cancer | prostate cancer | | | | |
| AR092 | prostate cancer #15176 | prostate cancer #15176 | | | | |
| AR093 | prostate cancer #15509 | prostate cancer #15509 | | | | |
| AR094 | prostate cancer #15673 | prostate cancer #15673 | | | | |
| AR095 | Small Intestine (Clontech) | Small Intestine (Clontech) | | | | |
| AR096 | Spleen | Spleen | | | | |
| AR097 | Thymus T cells activated | Thymus T cells activated | | | | |
| AR098 | Thymus T cells resting | Thymus T cells resting | | | | |
| AR099 | Tonsil | Tonsil | | | | |
| AR100 | Tonsil geminal center | Tonsil geminal center | | | | |
| | centroblast | centroblast | | | | |
| AR101 | Tonsil germinal center B | Tonsil germinal center B cell | | | | |
| | cell | | | | | |
| AR102 | Tonsil lymph node | Tonsil lymph node | | | | |
| AR103 | Tonsil memory B cell | Tonsil memory B cell | | | | |
| AR104 | Whole Brain | Whole Brain | | | | |
| AR105 | Xenograft ES-2 | Xenograft ES-2 | | | | |
| AR106 | Xenograft SW626 | Xenograft SW626 | | | | |
| AR119 | 001: IL-2 | 001: IL-2 | | | | |
| AR120 | 001: IL-2.1 | 001: 1L-2.1 | | | | |
| AR121 | 001: IL-2_b | 001: IL-2_b | | | | |
| AR124 | 002: Monocytes untreated | 002: Monocytes untreated | | | | |
| | (1 hr) | (1 hr) | | | | |
| AR125 | 002: Monocytes untreated | 002: Monocytes untreated | | | | |
| | (5 hrs) | (5 hrs) | | | | |
| AR126 | 002: Control.1C | 002: Control.1C | | | | |
| AR127 | 002: IL2.1C | 002: IL2.1C | | | | |
| AR130 | 003: Placebo-treated Rat | 003: Placebo-treated Rat | | | | |
| | Lacrimal Gland | Lacrimal Gland | | | | |
| AR131 | 003: Placebo-treated Rat | 003: Placebo-treated Rat | | | | |
| | Submandibular Gland | Submandibular Gland | | | | |
| AR135 | 004: Monocytes untreated | 004: Monocytes untreated | | | | |
| | (5 hrs) | (5 hrs) | | | | |
| AR136 | 004: Monocytes untreated | 004: Monocytes untreated 1 hr | | | | |
| | 1 hr | | | | | |
| AR139 | 005: Placebo (48 hrs) | 005: Placebo (48 hrs) | | | | |
| AR140 | 006: pC4 (24 hrs) | 006: pC4 (24 hrs) | | | | |
| AR141 | 006: pC4 (48 hrs) | 006: pC4 (48 hrs) | | | | |
| AR152 | 007: PHA(1 hr) | 007: PHA(1 hr) | | | | |
| AR153 | 007: PHA(6 HRS) | 007: PHA(6 HRS) | | | | |
| AR154 | 007: PMA(6 hrs) | 007: PMA(6 hrs) | | | | |
| AR155 | 008: 1449_#2 | 008: 1449_#2 | | | | |
| AR167 | 1449 Sample | 1449 Sample | | | | |
| AR168 | 3T3P10 1.0 uM insulin | 3T3P10 1.0 uM insulin | | | | |
| AR169 | 3T3P10 10 nM Insulin | 3T3P10 10 nM Insulin | | | | |
| AR170 | 3T3P10 10 uM insulin | 3T3P10 10 uM insulin | | | | |
| AR171 | 3T3P10 No Insulin | 3T3P10 No Insulin | | | | |
| AR172 | 3T3P4 | 3T3P4 | | | | |
| AR173 | Adipose (41892) | Adipose (41892) | | | | |
| AR174 | Adipose Diabetic (41611) | Adipose Diabetic (41611) | | | | |
| AR175 | Adipose Diabetic (41661) | Adipose Diabetic (41661) | | | | |
| AR176 | Adipose Diabetic (41689) | Adipose Diabetic (41689) | | | | |
| AR177 | Adipose Diabetic (41706) | Adipose Diabetic (41706) | | | | |
| AR178 | Adipose Diabetic (42352) | Adipose Diabetic (42352) | | | | |
| AR179 | Adipose Diabetic (42366) | Adipose Diabetic (42366) | | | | |
| AR180 | Adipose Diabetic (42452) | Adipose Diabetic (42452) | | | | |
| AR181 | Adipose Diabetic (42491) | Adipose Diabetic (42491) | | | | |
| AR182 | Adipose Normal (41843) | Adipose Normal (41843) | | | | |
| AR183 | Adipose Normal (41893) | Adipose Normal (41893) | | | | |
| AR184 | Adipose Normal (42452) | Adipose Normal (42452) | | | | |
| AR185 | Adrenal Gland | Adrenal Gland | | | | |
| AR186 | Adrenal Gland + Whole | Adrenal Gland + Whole Brain | | | | |
| | Brain | | | | | |
| AR187 | B7(1 hr) + (inverted) | B7(1 hr) + (inverted) | | | | |
| AR188 | Breast (18275A2B) | Breast (18275A2B) | | | | |
| AR189 | Breast (4004199) | Breast (4004199) | | | | |
| AR190 | Breast (4004399) | Breast (4004399) | | | | |
| AR191 | Breast (4004943B7) | Breast (4004943B7) | | | | |
| AR192 | Breast (4005570B1) | Breast (4005570B1) | | | | |
| AR193 | Breast Cancer | Breast Cancer (4004127A30) | | | | |
| | (4004127A30) | | | | | |
| AR194 | Breast Cancer | Breast Cancer (400443A21) | | | | |
| | (400443A21) | | | | | |
| AR195 | Breast Cancer | Breast Cancer (4004643A2) | | | | |
| | (4004643A2) | | | | | |
| AR196 | Breast Cancer | Breast Cancer (4004710A7) | | | | |
| | (4004710A7) | | | | | |
| AR197 | Breast Cancer | Breast Cancer (4004943A21) | | | | |
| | (4004943A21) | | | | | |
| AR198 | Breast Cancer | Breast Cancer (400553A2) | | | | |
| | (400553A2) | | | | | |
| AR199 | Breast Cancer | Breast Cancer (9805C046R) | | | | |
| | (9805C046R) | | | | | |
| AR200 | Breast Cancer | Breast Cancer (9806C012R) | | | | |
| | (9806C012R) | | | | | |
| AR201 | Breast Cancer (ODQ | Breast Cancer (ODQ 45913) | | | | |
| | 45913) | | | | | |
| AR202 | Breast Cancer | Breast Cancer (ODQ45913) | | | | |
| | (ODQ45913) | | | | | |
| AR203 | Breast Cancer | Breast Cancer (ODQ4591B) | | | | |
| | (ODQ4591B) | | | | | |
| AR204 | Colon Cancer (15663) | Colon Cancer (15663) | | | | |
| AR205 | Colon Cancer | Colon Cancer (4005144A4) | | | | |
| | (4005144A4) | | | | | |
| AR206 | Colon Cancer | Colon Cancer (4005413A4) | | | | |
| | (4005413A4) | | | | | |
| AR207 | Colon Cancer | Colon Cancer (4005570B1) | | | | |
| | (4005570B1) | | | | | |
| AR208 | Control RNA #1 | Control RNA #1 | | | | |
| AR209 | Control RNA #2 | Control RNA #2 | | | | |
| AR210 | Cultured Preadipocyte | Cultured Preadipocyte (blue) | | | | |
| | (blue) | | | | | |
| AR211 | Cultured Preadipocyte | Cultured Preadipocyte (Red) | | | | |
| | (Red) | | | | | |
| AR212 | Donor II B-Cells 24 hrs | Donor II B-Cells 24 hrs | | | | |
| AR213 | Donor II Resting B-Cells | Donor II Resting B-Cells | | | | |
| AR214 | H114EP12 10 nM Insulin | H114EP12 10 nM Insulin | | | | |
| AR215 | H114EP12 (10 nM insulin) | H114EP12 (10 nM insulin) | | | | |
| AR216 | H114EP12 (2.6 ug/ul) | H114EP12 (2.6 ug/ul) | | | | |
| AR217 | H114EP12 (3.6 ug/ul) | H114EP12 (3.6 ug/ul) | | | | |
| AR218 | HUVEC #1 | HUVEC #1 | | | | |
| AR219 | HUVEC #2 | HUVEC #2 | | | | |
| AR221 | L6 undiff. | L6 undiff. | | | | |
| AR222 | L6 Undifferentiated | L6 Undifferentiated | | | | |
| AR223 | L6P8 + 10 nM Insulin | L6P8 + 10 nM Insulin | | | | |
| AR224 | L6P8 + HS | L6P8 + HS | | | | |
| AR225 | L6P8 10 nM Insulin | L6P8 10 nM Insulin | | | | |
| AR226 | Liver (00-06-A007B) | Liver (00-06-A007B) | | | | |
| AR227 | Liver (96-02-A075) | Liver (96-02-A075) | | | | |
| AR228 | Liver (96-03-A144) | Liver (96-03-A144) | | | | |
| AR229 | Liver (96-04-A138) | Liver (96-04-A138) | | | | |
| AR230 | Liver (97-10-A074B) | Liver (97-10-A074B) | | | | |
| AR231 | Liver (98-09-A242A) | Liver (98-09-A242A) | | | | |
| AR232 | Liver Diabetic (1042) | Liver Diabetic (1042) | | | | |
| AR233 | Liver Diabetic (41616) | Liver Diabetic (41616) | | | | |
| AR234 | Liver Diabetic (41955) | Liver Diabetic (41955) | | | | |
| AR235 | Liver Diabetic (42352R) | Liver Diabetic (42352R) | | | | |
| AR236 | Liver Diabetic (42366) | Liver Diabetic (42366) | | | | |
| AR237 | Liver Diabetic (42483) | Liver Diabetic (42483) | | | | |
| AR238 | Liver Diabetic (42491) | Liver Diabetic (42491) | | | | |
| AR239 | Liver Diabetic (99-09- | Liver Diabetic (99-09-A281A) | | | | |
| | A281A) | | | | | |
| AR240 | Lung | Lung | | | | |
| AR241 | Lung (27270) | Lung (27270) | | | | |
| AR242 | Lung (2727Q) | Lung (2727Q) | | | | |
| AR243 | Lung Cancer | Lung Cancer (4005116A1) | | | | |
| | (4005116A1) | | | | | |
| AR244 | Lung Cancer | Lung Cancer (4005121A5) | | | | |
| | (4005121A5) | | | | | |
| AR245 | Lung Cancer | Lung Cancer (4005121A5)) | | | | |
| | (4005121A5)) | | | | | |
| AR246 | Lung Cancer | Lung Cancer (4005340A4) | | | | |
| | (4005340A4) | | | | | |
| AR247 | Mammary Gland | Mammary Gland | | | | |
| AR248 | Monocyte (CT) | Monocyte (CT) | | | | |
| AR249 | Monocyte (OCT) | Monocyte (OCT) | | | | |
| AR250 | Monocytes (CT) | Monocytes (CT) | | | | |
| AR251 | Monocytes (INFG 18 hr) | Monocytes (INFG 18 hr) | | | | |
| AR252 | Monocytes (INFG 18 hr) | Monocytes (INFG 18 hr) | | | | |
| AR253 | Monocytes (INFG 8-11) | Monocytes (INFG 8-11) | | | | |
| AR254 | Monocytes (O CT) | Monocytes (O CT) | | | | |
| AR255 | Muscle (91-01-A105) | Muscle (91-01-A105) | | | | |
| AR256 | Muscle (92-04-A059) | Muscle (92-04-A059) | | | | |
| AR257 | Muscle (97-11-A056d) | Muscle (97-11-A056d) | | | | |
| AR258 | Muscle (99-06-A210A) | Muscle (99-06-A210A) | | | | |
| AR259 | Muscle (99-07-A203B) | Muscle (99-07-A203B) | | | | |
| AR260 | Muscle (99-7-A203B) | Muscle (99-7-A203B) | | | | |
| AR261 | Muscle Diabetic (42352R) | Muscle Diabetic (42352R) | | | | |
| AR262 | Muscle Diabetic (42366) | Muscle Diabetic (42366) | | | | |
| AR263 | NK-19 Control | NK-19 Control | | | | |
| AR264 | NK-19 IL Treated 72 hrs | NK-19 IL Treated 72 hrs | | | | |
| AR265 | NK-19 UK Treated 72 hrs. | NK-19 UK Treated 72 hrs. | | | | |
| AR266 | Omentum Normal (94-08- | Omentum Normal (94-08- | | | | |
| | B009) | B009) | | | | |
| AR267 | Omentum Normal (97-01- | Omentum Normal (97-01- | | | | |
| | A039A) | A039A) | | | | |
| AR268 | Omentum Normal (97-04- | Omentum Normal (97-04- | | | | |
| | A114C) | A114C) | | | | |
| AR269 | Omentum Normal (97-06- | Omentum Normal (97-06- | | | | |
| | A117C) | A117C) | | | | |
| AR270 | Omentum Normal (97-09- | Omentum Normal (97-09- | | | | |
| | B004C) | B004C) | | | | |
| AR271 | Ovarian Cancer | Ovarian Cancer (17717AID) | | | | |
| | (17717AID) | | | | | |
| AR272 | Ovarian Cancer | Ovarian Cancer (9905C023RC) | | | | |
| | (9905C023RC) | | | | | |
| AR273 | Ovarian Cancer | Ovarian Cancer (9905C032RC) | | | | |
| | (9905C032RC) | | | | | |
| AR274 | Ovary (9508G045) | Ovary (9508G045) | | | | |
| AR275 | Ovary (9701G208) | Ovary (9701G208) | | | | |
| AR276 | Ovary 9806G005 | Ovary 9806G005 | | | | |
| AR277 | Pancreas | Pancreas | | | | |
| AR278 | Placebo | Placebo | | | | |
| AR279 | rIL2 Control | rIL2 Control | | | | |
| AR280 | RSS288L | RSS288L | | | | |
| AR281 | RSS288LC | RSS288LC | | | | |
| AR282 | Salivary Gland | Salivary Gland | | | | |
| AR283 | Skeletal Muscle | Skeletal Muscle | | | | |
| AR284 | Skeletal Muscle (91-01- | Skeletal Muscle (91-01-A105) | | | | |
| | A105) | | | | | |
| AR285 | Skeletal Muscle (42180) | Skeletal Muscle (42180) | | | | |
| AR286 | Skeletal Muscle (42386) | Skeletal Muscle (42386) | | | | |
| AR287 | Skeletal Muscle (42461) | Skeletal Muscle (42461) | | | | |
| AR288 | Skeletal Muscle (91-01- | Skeletal Muscle (91-01-A105) | | | | |
| | A105) | | | | | |
| AR289 | Skeletal Muscle (92-04- | Skeletal Muscle (92-04-A059) | | | | |
| | A059) | | | | | |
| AR290 | Skeletal Muscle (96-08- | Skeletal Muscle (96-08-A171) | | | | |
| | A171) | | | | | |
| AR291 | Skeletal Muscle (97-07- | Skeletal Muscle (97-07- | | | | |
| | A190A) | A190A) | | | | |
| AR292 | Skeletal Muscle Diabetic | Skeletal Muscle Diabetic | | | | |
| | (42352) | (42352) | | | | |
| AR293 | Skeletal Muscle Diabetic | Skeletal Muscle Diabetic | | | | |
| | (42366) | (42366) | | | | |
| AR294 | Skeletal Muscle Diabetic | Skeletal Muscle Diabetic | | | | |
| | (42395) | (42395) | | | | |
| AR295 | Skeletal Muscle Diabetic | Skeletal Muscle Diabetic | | | | |
| | (42483) | (42483) | | | | |
| AR296 | Skeletal Muscle Diabetic | Skeletal Muscle Diabetic | | | | |
| | (42491) | (42491) | | | | |
| AR297 | Skeletal Muscle Diabetic | Skeletal Muscle Diabetic | | | | |
| | 42352 | 42352 | | | | |
| AR298 | Skeletal Musle (42461) | Skeletal Musle (42461) | | | | |
| AR299 | Small Intestine | Small Intestine | | | | |
| AR300 | Stomach | Stomach | | | | |
| AR301 | T-Cell + HDPBQ71.fc | T-Cell + HDPBQ71.fc 1449 | | | | |
| | 1449 16 hrs | 16 hrs | | | | |
| AR302 | T-Cell + HDPBQ71.fc | T-Cell + HDPBQ71.fc 1449 | | | | |
| | 1449 6 hrs | 6 hrs | | | | |
| AR303 | T-Cell + IL2 16 hrs | T-Cell + IL2 16 hrs | | | | |
| AR304 | T-Cell + IL2 6 hrs | T-Cell + IL2 6 hrs | | | | |
| AR306 | T-Cell Untreated 16 hrs | T-Cell Untreated 16 hrs | | | | |
| AR307 | T-Cell Untreated 6 hrs | T-Cell Untreated 6 hrs | | | | |
| AR308 | T-Cells 24 hours | T-Cells 24 hours | | | | |
| AR309 | T-Cells 24 hrs | T-Cells 24 hrs | | | | |
| AR310 | T-Cells 24 hrs. | T-Cells 24 hrs. | | | | |
| AR311 | T-Cells 24 hrs | T-Cells 24 hrs | | | | |
| AR312 | T-Cells 4 days | T-Cells 4 days | | | | |
| AR313 | Thymus | Thymus | | | | |
| AR314 | TRE | TRE | | | | |
| AR315 | TREC | TREC | | | | |
| AR317 | B lymphocyte, | B lymphocyte, | | | | |
| AR318 | (non-T; non-B) | (non-T; non-B) | | | | |
| AR326 | 001-293 RNA (Vector | 001-293 RNA (Vector | | | | |
| | Control) | Control) | | | | |
| AR327 | 001: Control | 001: Control | | | | |
| AR328 | 001: Control.1 | 001: Control.1 | | | | |
| AR355 | Acute Lymphocyte | Acute Lymphocyte Leukemia | | | | |
| | Leukemia | | | | | |
| AR356 | AML Patient #11 | AML Patient #11 | | | | |
| AR357 | AML Patient #2 | AML Patient #2 | | | | |
| AR358 | AML Patient #2 SGAH | AML Patient #2 SGAH | | | | |
| AR359 | AML Patient#2 | AML Patient#2 | | | | |
| AR360 | Aorta | Aorta | | | | |
| AR361 | B Cell | B Cell | | | | |
| AR362 | B lymphoblast | B lymphoblast | | | | |
| AR363 | B lymphocyte | B lymphocyte | | | | |
| AR364 | B lymphocytes | B lymphocytes | | | | |
| AR365 | B-cell | B-cell | | | | |
| AR366 | B-Cells | B-Cells | | | | |
| AR367 | B-Lymphoblast | B-Lymphoblast | | | | |
| AR368 | B-Lymphocytes | B-Lymphocytes | | | | |
| AR369 | Bladder | Bladder | | | | |
| AR370 | Bone Marrow | Bone Marrow | | | | |
| AR371 | Bronchial Epithelial Cell | Bronchial Epithelial Cell | | | | |
| AR372 | Bronchial Epithelial Cells | Bronchial Epithelial Cells | | | | |
| AR373 | Caco-2A | Caco-2A | | | | |
| AR374 | Caco-2B | Caco-2B | | | | |
| AR375 | Caco-2C | Caco-2C | | | | |
| AR376 | Cardiac #1 | Cardiac #1 | | | | |
| AR377 | Cardiac #2 | Cardiac #2 | | | | |
| AR378 | Chest Muscle | Chest Muscle | | | | |
| AR381 | Dendritic Cell | Dendritic Cell | | | | |
| AR382 | Dendritic cells | Dendritic cells | | | | |
| AR383 | E. coli | E. coli | | | | |
| AR384 | Epithelial Cells | Epithelial Cells | | | | |
| AR385 | Esophagus | Esophagus | | | | |
| AR386 | FPPS | FPPS | | | | |
| AR387 | FPPSC | FPPSC | | | | |
| AR388 | HepG2 Cell Line | HepG2 Cell Line | | | | |
| AR389 | HepG2 Cell line Buffer 1 hr. | HepG2 Cell line Buffer 1 hr. | | | | |
| AR390 | HepG2 Cell line Buffer 06 hr | HepG2 Cell line Buffer 06 hr | | | | |
| AR391 | HepG2 Cell line Buffer 24 hr. | HepG2 Cell line Buffer 24 hr. | | | | |
| AR392 | HepG2 Cell line Insulin | HepG2 Cell line Insulin 01 hr. | | | | |
| | 01 hr. | | | | | |
| AR393 | HepG2 Cell line Insulin | HepG2 Cell line Insulin 06 hr. | | | | |
| | 06 hr. | | | | | |
| AR394 | HepG2 Cell line Insulin | HepG2 Cell line Insulin 24 hr. | | | | |
| | 24 hr. | | | | | |
| AR398 | HMC-1 | HMC-1 | | | | |
| AR399 | HMCS | HMCS | | | | |
| AR400 | HMSC | HMSC | | | | |
| AR401 | HUVEC #3 | HUVEC #3 | | | | |
| AR402 | HUVEC #4 | HUVEC #4 | | | | |
| AR404 | KIDNEY NORMAL | KIDNEY NORMAL | | | | |
| AR405 | KIDNEY TUMOR | KIDNEY TUMOR | | | | |
| AR406 | KIDNEY TUMOR | | | | | |
| AR407 | Lymph Node | Lymph Node | | | | |
| AR408 | Macrophage | Macrophage | | | | |
| AR409 | Megakarioblast | Megakarioblast | | | | |
| AR410 | Monocyte | Monocyte | | | | |
| AR411 | Monocytes | Monocytes | | | | |
| AR412 | Myocardium | Myocardium | | | | |
| AR413 | Myocardium #3 | Myocardium #3 | | | | |
| AR414 | Myocardium #4 | Myocardium #4 | | | | |
| AR415 | Myocardium #5 | Myocardium #5 | | | | |
| AR416 | NK | NK | | | | |
| AR417 | NK cell | NK cell | | | | |
| AR418 | NK cells | NK cells | | | | |
| AR419 | NKYa | NKYa | | | | |
| AR420 | NKYa019 | NKYa019 | | | | |
| AR421 | Ovary | Ovary | | | | |
| AR422 | Patient #11 | Patient #11 | | | | |
| AR423 | Peripheral blood | Peripheral blood | | | | |
| AR424 | Primary Adipocytes | Primary Adipocytes | | | | |
| AR425 | Promyeloblast | Promyeloblast | | | | |
| AR427 | RSSWT | RSSWT | | | | |
| AR428 | RSSWTC | RSSWTC | | | | |
| AR429 | SW 480(G1) | SW 480(G1) | | | | |
| AR430 | SW 480(G2) | SW 480(G2) | | | | |
| AR431 | SW 480(G3) | SW 480(G3) | | | | |
| AR432 | SW 480(G4) | SW 480(G4) | | | | |
| AR433 | SW 480(G5) | SW 480(G5) | | | | |
| AR434 | T Lymphoblast | T Lymphoblast | | | | |
| AR435 | T Lymphocyte | T Lymphocyte | | | | |
| AR436 | T-Cell | T-Cell | | | | |
| AR438 | T-Cell, | T-Cell, | | | | |
| AR439 | T-Cells | T-Cells | | | | |
| AR440 | T-lymphoblast | T-lymphoblast | | | | |
| AR441 | Th 1 | Th 1 | | | | |
| AR442 | Th 2 | Th 2 | | | | |
| AR443 | Th1 | Th1 | | | | |
| AR444 | Th2 | Th2 | | | | |
| H0004 | Human Adult Spleen | Human Adult Spleen | Spleen | | | Uni-ZAP XR |
| H0007 | Human Cerebellum | Human Cerebellum | Brain | | | Uni-ZAP XR |
| H0008 | Whole 6 Week Old | | | | | Uni-ZAP XR |
| | Embryo | | | | | |
| H0009 | Human Fetal Brain | | | | | Uni-ZAP XR |
| H0012 | Human Fetal Kidney | Human Fetal Kidney | Kidney | | | Uni-ZAP XR |
| H0013 | Human 8 Week Whole | Human 8 Week Old Embryo | Embryo | | | Uni-ZAP XR |
| | Embryo | | | | | |
| H0014 | Human Gall Bladder | Human Gall Bladder | Gall Bladder | | | Uni-ZAP XR |
| H0015 | Human Gall Bladder, | Human Gall Bladder | Gall Bladder | | | Uni-ZAP XR |
| | fraction II | | | | | |
| H0024 | Human Fetal Lung III | Human Fetal Lung | Lung | | | Uni-ZAP XR |
| H0025 | Human Adult Lymph | Human Adult Lymph Node | Lymph Node | | | Lambda ZAP II |
| | Node | | | | | |
| H0030 | Human Placenta | | | | | Uni-ZAP XR |
| H0031 | Human Placenta | Human Placenta | Placenta | | | Uni-ZAP XR |
| H0032 | Human Prostate | Human Prostate | Prostate | | | Uni-ZAP XR |
| H0033 | Human Pituitary | Human Pituitary | | | | Uni-ZAP XR |
| H0036 | Human Adult Small | Human Adult Small Intestine | Small Int. | | | Uni-ZAP XR |
| | Intestine | | | | | |
| H0038 | Human Testes | Human Testes | Testis | | | Uni-ZAP XR |
| H0039 | Human Pancreas Tumor | Human Pancreas Tumor | Pancreas | | disease | Uni-ZAP XR |
| H0040 | Human Testes Tumor | Human Testes Tumor | Testis | | disease | Uni-ZAP XR |
| H0041 | Human Fetal Bone | Human Fetal Bone | Bone | | | Uni-ZAP XR |
| H0042 | Human Adult Pulmonary | Human Adult Pulmonary | Lung | | | Uni-ZAP XR |
| H0046 | Human Endometrial | Human Endometrial Tumor | Uterus | | disease | Uni-ZAP XR |
| | Tumor | | | | | |
| H0050 | Human Fetal Heart | Human Fetal Heart | Heart | | | Uni-ZAP XR |
| H0051 | Human Hippocampus | Human Hippocampus | Brain | | | Uni-ZAP XR |
| H0052 | Human Cerebellum | Human Cerebellum | Brain | | | Uni-ZAP XR |
| H0056 | Human Umbilical Vein, | Human Umbilical Vein | Umbilical vein | | | Uni-ZAP XR |
| | Endo. remake | Endothelial Cells | | | | |
| H0057 | Human Fetal Spleen | | | | | Uni-ZAP XR |
| H0059 | Human Uterine Cancer | Human Uterine Cancer | Uterus | | disease | Lambda ZAP II |
| H0063 | Human Thymus | Human Thymus | Thymus | | | Uni-ZAP XR |
| H0068 | Human Skin Tumor | Human Skin Tumor | Skin | | disease | Uni-ZAP XR |
| H0069 | Human Activated T-Cells | Activated T-Cells | Blood | Cell Line | | Uni-ZAP XR |
| H0071 | Human Infant Adrenal | Human Infant Adrenal Gland | Adrenal gland | | | Uni-ZAP XR |
| | Gland | | | | | |
| H0073 | Human Leiomyeloid | Human Leiomyeloid | Muscle | | disease | Uni-ZAP XR |
| | Carcinoma | Carcinoma | | | | |
| H0077 | Human Thymus Tumor | Human Thymus Tumor | Thymus | | disease | Lambda ZAP II |
| H0081 | Human Fetal Epithelium | Human Fetal Skin | Skin | | | Uni-ZAP XR |
| | (Skin) | | | | | |
| H0083 | HUMAN JURKAT | Jurkat Cells | | | | Uni-ZAP XR |
| | MEMBRANE BOUND | | | | | |
| | POLYSOMES | | | | | |
| H0085 | Human Colon | Human Colon | | | | Lambda ZAP II |
| H0087 | Human Thymus | Human Thymus | | | | pBluescript |
| H0090 | Human T-Cell Lymphoma | T-Cell Lymphoma | T-Cell | | disease | Uni-ZAP XR |
| H0096 | Human Parotid Cancer | Human Parotid Cancer | Parotid | | disease | Lambda ZAP II |
| H0098 | Human Adult Liver, | Human Adult Liver | Liver | | | Uni-ZAP XR |
| | subtracted | | | | | |
| H0100 | Human Whole Six Week | Human Whole Six Week Old | Embryo | | | Uni-ZAP XR |
| | Old Embryo | Embryo | | | | |
| H0108 | Human Adult Lymph | Human Adult Lymph Node | Lymph Node | | | Uni-ZAP XR |
| | Node, subtracted | | | | | |
| H0111 | Human Placenta, | Human Placenta | Placenta | | | pBluescript |
| | subtracted | | | | | |
| H0112 | Human Parathyroid | Human Parathyroid Tumor | Parathyroid | | | pBluescript |
| | Tumor, subtracted | | | | | |
| H0122 | Human Adult Skeletal | Human Skeletal Muscle | Sk Muscle | | | Uni-ZAP XR |
| | Muscle | | | | | |
| H0123 | Human Fetal Dura Mater | Human Fetal Dura Mater | Brain | | | Uni-ZAP XR |
| H0124 | Human | Human Rhabdomyosarcoma | Sk Muscle | | disease | Uni-ZAP XR |
| | Rhabdomyosarcoma | | | | | |
| H0125 | Cem cells cyclohexamide | Cyclohexamide Treated Cem, | Blood | Cell Line | | Uni-ZAP XR |
| | treated | Jurkat, Raji, and Supt | | | | |
| H0130 | LNCAP untreated | LNCAP Cell Line | Prostate | Cell Line | | Uni-ZAP XR |
| H0131 | LNCAP + 0.3 nM R1881 | LNCAP Cell Line | Prostate | Cell Line | | Uni-ZAP XR |
| H0132 | LNCAP + 30 nM R1881 | LNCAP Cell Line | Prostate | Cell Line | | Uni-ZAP XR |
| H0134 | Raji Cells, cyclohexamide | Cyclohexamide Treated Cem, | Blood | Cell Line | | Uni-ZAP XR |
| | treated | Jurkat, Raji, and Supt | | | | |
| H0135 | Human Synovial Sarcoma | Human Synovial Sarcoma | Synovium | | | Uni-ZAP XR |
| H0136 | Supt Cells, cyclohexamide | Cyclohexamide Treated Cem, | Blood | Cell Line | | Uni-ZAP XR |
| | treated | Jurkat, Raji, and Supt | | | | |
| H0139 | Activated T-Cells, 4 hrs. | Activated T-Cells | Blood | Cell Line | | Uni-ZAP XR |
| H0140 | Activated T-Cells, 8 hrs. | Activated T-Cells | Blood | Cell Line | | Uni-ZAP XR |
| H0141 | Activated T-Cells, 12 hrs. | Activated T-Cells | Blood | Cell Line | | Uni-ZAP XR |
| H0144 | Nine Week Old Early | 9 Wk Old Early Stage Human | Embryo | | | Uni-ZAP XR |
| | Stage Human | | | | | |
| H0149 | 7 Week Old Early Stage | Human Whole 7 Week Old | Embryo | | | Uni-ZAP XR |
| | Human, subtracted | Embryo | | | | |
| H0150 | Human Epididymus | Epididymis | Testis | | | Uni-ZAP XR |
| H0151 | Early Stage Human Liver | Human Fetal Liver | Liver | | | Uni-ZAP XR |
| H0156 | Human Adrenal Gland | Human Adrenal Gland Tumor | Adrenal Gland | | disease | Uni-ZAP XR |
| | Tumor | | | | | |
| H0160 | Activated T-Cells, 12 hrs., | Activated T-Cells | Blood | Cell Line | | Uni-ZAP XR |
| | ligation 2 | | | | | |
| H0161 | Activated T-Cells, 24 hrs., | Activated T-Cells | Blood | Cell Line | | Uni-ZAP XR |
| | ligation 2 | | | | | |
| H0163 | Human Synovium | Human Synovium | Synovium | | | Uni-ZAP XR |
| H0165 | Human Prostate Cancer, | Human Prostate Cancer, stage | Prostate | | disease | Uni-ZAP XR |
| | Stage B2 | B2 | | | | |
| H0166 | Human Prostate Cancer, | Human Prostate Cancer, stage | Prostate | | disease | Uni-ZAP XR |
| | Stage B2 fraction | B2 | | | | |
| H0169 | Human Prostate Cancer, | Human Prostate Cancer, stage C | Prostate | | disease | Uni-ZAP XR |
| | Stage C fraction | | | | | |
| H0170 | 12 Week Old Early Stage | Twelve Week Old Early Stage | Embryo | | | Uni-ZAP XR |
| | Human | Human | | | | |
| H0171 | 12 Week Old Early Stage | Twelve Week Old Early Stage | Embryo | | | Uni-ZAP XR |
| | Human, II | Human | | | | |
| H0172 | Human Fetal Brain, | Human Fetal Brain | Brain | | | Lambda ZAP II |
| | random primed | | | | | |
| H0176 | CAMA1Ee Cell Line | CAMA1Ee Cell Line | Breast | Cell Line | | Uni-ZAP XR |
| H0178 | Human Fetal Brain | Human Fetal Brain | Brain | | | Uni-ZAP XR |
| H0179 | Human Neutrophil | Human Neutrophil | Blood | Cell Line | | Uni-ZAP XR |
| H0181 | Human Primary Breast | Human Primary Breast Cancer | Breast | | disease | Uni-ZAP XR |
| | Cancer | | | | | |
| H0182 | Human Primary Breast | Human Primary Breast Cancer | Breast | | disease | Uni-ZAP XR |
| | Cancer | | | | | |
| H0187 | Resting T-Cell | T-Cells | Blood | Cell Line | | Lambda ZAP II |
| H0188 | Human Normal Breast | Human Normal Breast | Breast | | | Uni-ZAP XR |
| H0192 | Cem Cells, | Cyclohexamide Treated Cem, | Blood | Cell Line | | Uni-ZAP XR |
| | cyclohexamide treated, | Jurkat, Raji, and Supt | | | | |
| | subtra | | | | | |
| H0194 | Human Cerebellum, | Human Cerebellum | Brain | | | pBluescript |
| | subtracted | | | | | |
| H0196 | Human Cardiomyopathy, | Human Cardiomyopathy | Heart | | | Uni-ZAP XR |
| | subtracted | | | | | |
| H0204 | Human Colon Cancer, | Human Colon Cancer | Colon | | | pBluescript |
| | subtracted | | | | | |
| H0208 | Early Stage Human Lung, | Human Fetal Lung | Lung | | | pBluescript |
| | subtracted | | | | | |
| H0211 | Human | Human Prostate | Prostate | | | pBluescript |
| | Prostate, differential | | | | | |
| | expression | | | | | |
| H0212 | Human Prostate, | Human Prostate | Prostate | | | pBluescript |
| | subtracted | | | | | |
| H0213 | Human Pituitary, | Human Pituitary | | | | Uni-ZAP XR |
| | subtracted | | | | | |
| H0214 | Raji cells, cyclohexamide | Cyclohexamide Treated Cem, | Blood | Cell Line | | pBluescript |
| | treated, subtracted | Jurkat, Raji, and Supt | | | | |
| H0218 | Activated T-Cells, 0 hrs, | Activated T-Cells | Blood | Cell Line | | Uni-ZAP XR |
| | subtracted | | | | | |
| H0222 | Activated T-Cells, 8 hrs, | Activated T-Cells | Blood | Cell Line | | Uni-ZAP XR |
| | subtracted | | | | | |
| H0224 | Activated T-Cells, 12 hrs, | Activated T-Cells | Blood | Cell Line | | Uni-ZAP XR |
| | subtracted | | | | | |
| H0225 | Activated T-Cells, 12 hrs, | Activated T-Cells | Blood | Cell Line | | Uni-ZAP XR |
| | differentially expressed | | | | | |
| H0231 | Human Colon, subtraction | Human Colon | | | | pBluescript |
| H0233 | Human Fetal Heart, | Human Fetal Heart | Heart | | | pBluescript |
| | Differential (Adult- | | | | | |
| | Specific) | | | | | |
| H0235 | Human colon cancer, | Human Colon Cancer, | Liver | | | pBluescript |
| | metaticized to liver, | metasticized to liver | | | | |
| | subtraction | | | | | |
| H0239 | Human Kidney Tumor | Human Kidney Tumor | Kidney | | disease | Uni-ZAP XR |
| H0242 | Human Fetal Heart, | Human Fetal Heart | Heart | | | pBluescript |
| | Differential (Fetal- | | | | | |
| | Specific) | | | | | |
| H0244 | Human 8 Week Whole | Human 8 Week Old Embryo | Embryo | | | Uni-ZAP XR |
| | Embryo, subtracted | | | | | |
| H0250 | Human Activated | Human Monocytes | | | | Uni-ZAP XR |
| | Monocytes | | | | | |
| H0251 | Human Chondrosarcoma | Human Chondrosarcoma | Cartilage | | disease | Uni-ZAP XR |
| H0252 | Human Osteosarcoma | Human Osteosarcoma | Bone | | disease | Uni-ZAP XR |
| H0253 | Human adult testis, large | Human Adult Testis | Testis | | | Uni-ZAP XR |
| | inserts | | | | | |
| H0254 | Breast Lymph node | Breast Lymph Node | Lymph Node | | | Uni-ZAP XR |
| | cDNA library | | | | | |
| H0255 | breast lymph node CDNA | Breast Lymph Node | Lymph Node | | | Lambda ZAP II |
| | library | | | | | |
| H0261 | H. cerebellum, Enzyme | Human Cerebellum | Brain | | | Uni-ZAP XR |
| | subtracted | | | | | |
| H0263 | human colon cancer | Human Colon Cancer | Colon | | disease | Lambda ZAP II |
| H0264 | human tonsils | Human Tonsil | Tonsil | | | Uni-ZAP XR |
| H0265 | Activated T-Cell | T-Cells | Blood | Cell Line | | Uni-ZAP XR |
| | (12 hs)/Thiouridine | | | | | |
| | labelledEco | | | | | |
| H0266 | Human Microvascular | HMEC | Vein | Cell Line | | Lambda ZAP II |
| | Endothelial Cells, fract. A | | | | | |
| H0267 | Human Microvascular | HMEC | Vein | Cell Line | | Lambda ZAP II |
| | Endothelial Cells, fract. B | | | | | |
| H0268 | Human Umbilical Vein | HUVE Cells | Umbilical vein | Cell Line | | Lambda ZAP II |
| | Endothelial Cells, fract. A | | | | | |
| H0270 | HPAS (human pancreas, | Human Pancreas | Pancreas | | | Uni-ZAP XR |
| | subtracted) | | | | | |
| H0271 | Human Neutrophil, | Human Neutrophil - Activated | Blood | Cell Line | | Uni-ZAP XR |
| | Activated | | | | | |
| H0272 | HUMAN TONSILS, | Human Tonsil | Tonsil | | | Uni-ZAP XR |
| | FRACTION 2 | | | | | |
| H0275 | Human Infant Adrenal | Human Infant Adrenal Gland | Adrenal gland | | | pBluescript |
| | Gland, Subtracted | | | | | |
| H0280 | K562 + PMA (36 hrs) | K562 Cell line | cell line | Cell Line | | ZAP Express |
| H0284 | Human OB MG63 control | Human Osteoblastoma MG63 | Bone | Cell Line | | Uni-ZAP XR |
| | fraction I | cell line | | | | |
| H0286 | Human OB MG63 treated | Human Osteoblastoma MG63 | Bone | Cell Line | | Uni-ZAP XR |
| | (10 nM E2) fraction I | cell line | | | | |
| H0288 | Human OB HOS control | Human Osteoblastoma HOS | Bone | Cell Line | | Uni-ZAP XR |
| | fraction I | cell line | | | | |
| H0290 | Human OB HOS treated | Human Osteoblastoma HOS | Bone | Cell Line | | Uni-ZAP XR |
| | (1 nM E2) fraction I | cell line | | | | |
| H0292 | Human OB HOS treated | Human Osteoblastoma HOS | Bone | Cell Line | | Uni-ZAP XR |
| | (10 nM E2) fraction I | cell line | | | | |
| H0294 | Amniotic Cells - TNF | Amniotic Cells - TNF induced | Placenta | Cell Line | | Uni-ZAP XR |
| | induced | | | | | |
| H0295 | Amniotic Cells - Primary | Amniotic Cells - Primary | Placenta | Cell Line | | Uni-ZAP XR |
| | Culture | Culture | | | | |
| H0298 | HCBB''s differential | CAMA1Ee Cell Line | Breast | Cell Line | | Uni-ZAP XR |
| | consolidation | | | | | |
| H0305 | CD34 positive cells (Cord | CD34 Positive Cells | Cord Blood | | | ZAP Express |
| | Blood) | | | | | |
| H0306 | CD34 depleted Buffy | CD34 Depleted Buffy Coat | Cord Blood | | | ZAP Express |
| | Coat (Cord Blood) | (Cord Blood) | | | | |
| H0309 | Human Chronic Synovitis | Synovium, Chronic Synovitis/ | Synovium | | disease | Uni-ZAP XR |
| | | Osteoarthritis | | | | |
| H0310 | human caudate nucleus | Brain | Brain | | | Uni-ZAP XR |
| H0313 | human pleural cancer | pleural cancer | | | disease | pBluescript |
| H0316 | HUMAN STOMACH | Human Stomach | Stomach | | | Uni-ZAP XR |
| H0318 | HUMAN B CELL | Human B Cell Lymphoma | Lymph Node | | disease | Uni-ZAP XR |
| | LYMPHOMA | | | | | |
| H0320 | Human frontal cortex | Human Frontal Cortex | Brain | | | Uni-ZAP XR |
| H0327 | human corpus colosum | Human Corpus Callosum | Brain | | | Uni-ZAP XR |
| H0328 | human ovarian cancer | Ovarian Cancer | Ovary | | disease | Uni-ZAP XR |
| H0329 | Dermatofibrosarcoma | Dermatofibrosarcoma | Skin | | disease | Uni-ZAP XR |
| | Protuberance | Protuberans | | | | |
| H0331 | Hepatocellular Tumor | Hepatocellular Tumor | Liver | | disease | Lambda ZAP II |
| H0333 | Hemangiopericytoma | Hemangiopericytoma | Blood vessel | | disease | Lambda ZAP II |
| H0334 | Kidney cancer | Kidney Cancer | Kidney | | disease | Uni-ZAP XR |
| H0341 | Bone Marrow Cell Line | Bone Marrow Cell Line | Bone Marrow | Cell Line | | Uni-ZAP XR |
| | (RS4; 11) | RS4; 11 | | | | |
| H0343 | stomach cancer (human) | Stomach Cancer - 5383A | | | disease | Uni-ZAP XR |
| | | (human) | | | | |
| H0346 | Brain-medulloblastoma | Brain (Medulloblastoma)- | Brain | | disease | Uni-ZAP XR |
| | | 9405C006R | | | | |
| H0350 | Human Fetal Liver, mixed | Human Fetal Liver, mixed | Liver | | | Uni-ZAP XR |
| | 10 & 14 week | 10&14 Week | | | | |
| H0351 | Glioblastoma | Glioblastoma | Brain | | disease | Uni-ZAP XR |
| H0352 | wilm''s tumor | Wilm''s Tumor | | | disease | Uni-ZAP XR |
| H0354 | Human Leukocytes | Human Leukocytes | Blood | Cell Line | | pCMVSport 1 |
| H0355 | Human Liver | Human Liver, normal Adult | | | | pCMVSport 1 |
| H0356 | Human Kidney | Human Kidney | Kidney | | | pCMVSport 1 |
| H0357 | H. Normalized Fetal | Human Fetal Liver | Liver | | | Uni-ZAP XR |
| | Liver, II | | | | | |
| H0359 | KMH2 cell line | KMH2 | | | | ZAP Express |
| H0369 | H. Atrophic Endometrium | Atrophic Endometrium and | | | | Uni-ZAP XR |
| | | myometrium | | | | |
| H0370 | H. Lymph node breast | Lymph node with Met. Breast | | | disease | Uni-ZAP XR |
| | Cancer | Cancer | | | | |
| H0373 | Human Heart | Human Adult Heart | Heart | | | pCMVSport 1 |
| H0375 | Human Lung | Human Lung | | | | pCMVSport 1 |
| H0380 | Human Tongue, frac 2 | Human Tongue | | | | pSport1 |
| H0381 | Bone Cancer | Bone Cancer | | | disease | Uni-ZAP XR |
| H0383 | Human Prostate BPH, re- | Human Prostate BPH | | | | Uni-ZAP XR |
| | excision | | | | | |
| H0384 | Brain, Kozak | Human Brain | | | | pCMVSport 1 |
| H0386 | Leukocyte and Lung; 4 | Human Leukocytes | Blood | Cell Line | | pCMVSport 1 |
| | screens | | | | | |
| H0390 | Human Amygdala | Human Amygdala Depression | | | disease | pBluescript |
| | Depression, re-excision | | | | | |
| H0392 | H. Meningima, M1 | Human Meningima | brain | | | pSport1 |
| H0393 | Fetal Liver, subtraction II | Human Fetal Liver | Liver | | | pBluescript |
| H0394 | A-14 cell line | Redd-Sternberg cell | | | | ZAP Express |
| H0399 | Human Kidney Cortex, | Human Kidney Cortex | | | | Lambda ZAP II |
| | re-rescue | | | | | |
| H0402 | CD34 depleted Buffy | CD34 Depleted Buffy Coat | Cord Blood | | | ZAP Express |
| | Coat (Cord Blood), re- | (Cord Blood) | | | | |
| | excision | | | | | |
| H0404 | H. Umbilical Vein | HUVE Cells | Umbilical vein | Cell Line | | Uni-ZAP XR |
| | endothelial cells, | | | | | |
| | uninduced | | | | | |
| H0405 | Human Pituitary, | Human Pituitary | | | | pBluescript |
| | subtracted VI | | | | | |
| H0406 | H Amygdala Depression, | Human Amygdala Depression | | | | Uni-ZAP XR |
| | subtracted | | | | | |
| H0408 | Human kidney Cortex, | Human Kidney Cortex | | | | pBluescript |
| | subtracted | | | | | |
| H0409 | H. Striatum Depression, | Human Brain, Striatum | Brain | | | pBluescript |
| | subtracted | Depression | | | | |
| H0410 | H. Male bladder, adult | H Male Bladder, Adult | Bladder | | | pSport1 |
| H0411 | H Female Bladder, Adult | Human Female Adult Bladder | Bladder | | | pSport1 |
| H0412 | Human umbilical vein | HUVE Cells | Umbilical vein | Cell Line | | pSport1 |
| | endothelial cells, IL-4 | | | | | |
| | induced | | | | | |
| H0413 | Human Umbilical Vein | HUVE Cells | Umbilical vein | Cell Line | | pSport1 |
| | Endothelial Cells, | | | | | |
| | uninduced | | | | | |
| H0415 | H. Ovarian Tumor, II, | Ovarian Tumor, OV5232 | Ovary | | disease | pCMVSport 2.0 |
| | OV5232 | | | | | |
| H0416 | Human Neutrophils, | Human Neutrophil - Activated | Blood | Cell Line | | pBluescript |
| | Activated, re-excision | | | | | |
| H0417 | Human Pituitary, | Human Pituitary | | | | pBluescript |
| | subtracted VIII | | | | | |
| H0418 | Human Pituitary, | Human Pituitary | | | | pBluescript |
| | subtracted VII | | | | | |
| H0421 | Human Bone Marrow, re- | Bone Marrow | | | | pBluescript |
| | excision | | | | | |
| H0422 | T-Cell PHA 16 hrs | T-Cells | Blood | Cell Line | | pSport1 |
| H0423 | T-Cell PHA 24 hrs | T-Cells | Blood | Cell Line | | pSport1 |
| H0424 | Human Pituitary, subt IX | Human Pituitary | | | | pBluescript |
| H0427 | Human Adipose | Human Adipose, left hiplipoma | | | | pSport1 |
| H0428 | Human Ovary | Human Ovary Tumor | Ovary | | | pSport1 |
| H0429 | K562 + PMA (36 hrs), re- | K562 Cell line | cell line | Cell Line | | ZAP Express |
| | excision | | | | | |
| H0431 | H. Kidney Medulla, re- | Kidney medulla | Kidney | | | pBluescript |
| | excision | | | | | |
| H0433 | Human Umbilical Vein | HUVE Cells | Umbilical vein | Cell Line | | pBluescript |
| | Endothelial cells, frac B, | | | | | |
| | re-excision | | | | | |
| H0435 | Ovarian Tumor 10-3-95 | Ovarian Tumor, OV350721 | Ovary | | | pCMVSport 2.0 |
| H0436 | Resting T-Cell Library, II | T-Cells | Blood | Cell Line | | pSport1 |
| H0438 | H. Whole Brain #2, re- | Human Whole Brain #2 | | | | ZAP Express |
| | excision | | | | | |
| H0441 | H. Kidney Cortex, | Kidney cortex | Kidney | | | pBluescript |
| | subtracted | | | | | |
| H0444 | Spleen metastic | Spleen, Metastic malignant | Spleen | | disease | pSport1 |
| | melanoma | melanoma | | | | |
| H0445 | Spleen, Chronic | Human Spleen, CLL | Spleen | | disease | pSport1 |
| | lymphocytic leukemia | | | | | |
| H0455 | H. Striatum Depression, | Human Brain, Striatum | Brain | | | pBluescript |
| | subt | Depression | | | | |
| H0457 | Human Eosinophils | Human Eosinophils | | | | pSport1 |
| H0458 | CD34+ cell, I, frac II | CD34 positive cells | | | | pSport1 |
| H0459 | CD34+cells, II, | CD34 positive cells | | | | pCMVSport 2.0 |
| | FRACTION 2 | | | | | |
| H0461 | H. Kidney Medulla, | Kidney medulla | Kidney | | | pBluescript |
| | subtracted | | | | | |
| H0478 | Salivary Gland, Lib 2 | Human Salivary Gland | Salivary gland | | | pSport1 |
| H0483 | Breast Cancer cell line, | Breast Cancer Cell line, MDA | | | | pSport1 |
| | MDA 36 | 36 | | | | |
| H0484 | Breast Cancer Cell line, | Breast Cancer Cell line, | | | | pSport1 |
| | angiogenic | Angiogenic, 36T3 | | | | |
| H0485 | Hodgkin''s Lymphoma I | Hodgkin''s Lymphoma I | | | disease | pCMVSport 2.0 |
| H0486 | Hodgkin''s Lymphoma II | Hodgkin''s Lymphoma II | | | disease | pCMVSport 2.0 |
| H0488 | Human Tonsils, Lib 2 | Human Tonsils | | | | pCMVSport 2.0 |
| H0492 | HL-60, RA 4 h, Subtracted | HL-60 Cells, RA stimulated for | Blood | Cell Line | | Uni-ZAP XR |
| | | 4 H | | | | |
| H0494 | Keratinocyte | Keratinocyte | | | | pCMVSport 2.0 |
| H0497 | HEL cell line | HEL cell line | | HEL 92.1.7 | | pSport1 |
| H0505 | Human Astrocyte | Human Astrocyte | | | | pSport1 |
| H0506 | Ulcerative Colitis | Colon | Colon | | | pSport1 |
| H0509 | Liver, Hepatoma | Human Liver, Hepatoma, | Liver | | disease | pCMVSport 3.0 |
| | | patient 8 | | | | |
| H0510 | Human Liver, normal | Human Liver, normal, Patient #8 | Liver | | | pCMVSport 3.0 |
| H0518 | pBMC stimulated w/poly | pBMC stimulated with poly I/C | | | | pCMVSport 3.0 |
| | I/C | | | | | |
| H0519 | NTERA2, control | NTERA2, Teratocarcinoma | | | | pCMVSport 3.0 |
| | | cell line | | | | |
| H0520 | NTERA2 + retinoic acid, | NTERA2, Teratocarcinoma | | | | pSport1 |
| | 14 days | cell line | | | | |
| H0521 | Primary Dendritic Cells, | Primary Dendritic cells | | | | pCMVSport 3.0 |
| | lib 1 | | | | | |
| H0522 | Primary Dendritic | Primary Dendritic cells | | | | pCMVSport 3.0 |
| | cells, frac 2 | | | | | |
| H0525 | PCR, pBMC I/C treated | pBMC stimulated with poly I/C | | | | PCRII |
| H0529 | Myoloid Progenitor Cell | TF-1 Cell Line; Myoloid | | | | pCMVSport 3.0 |
| | Line | progenitor cell line | | | | |
| H0530 | Human Dermal | Human Dermal Endothelial | | | | pSport1 |
| | Endothelial | Cells; untreated | | | | |
| | Cells, untreated | | | | | |
| H0537 | H. Primary Dendritic | Primary Dendritic cells | | | | pCMVSport 2.0 |
| | Cells, lib 3 | | | | | |
| H0538 | Merkel Cells | Merkel cells | Lymph node | | | pSport1 |
| H0539 | Pancreas Islet Cell Tumor | Pancreas Islet Cell Tumour | Pancreas | | disease | pSport1 |
| H0542 | T Cell helper I | Helper T cell | | | | pCMVSport 3.0 |
| H0543 | T cell helper II | Helper T cell | | | | pCMVSport 3.0 |
| H0544 | Human endometrial | Human endometrial stromal | | | | pCMVSport 3.0 |
| | stromal cells | cells | | | | |
| H0545 | Human endometrial | Human endometrial stromal | | | | pCMVSport 3.0 |
| | stromal cells-treated with | cells-treated with proge | | | | |
| | progesterone | | | | | |
| H0546 | Human endometrial | Human endometrial stromal | | | | pCMVSport 3.0 |
| | stromal cells-treated with | cells-treated with estra | | | | |
| | estradiol | | | | | |
| H0547 | NTERA2 teratocarcinoma | NTERA2, Teratocarcinoma | | | | pSport1 |
| | cell line + retinoic acid (14 | cell line | | | | |
| | days) | | | | | |
| H0549 | H. Epididiymus, caput & | Human Epididiymus, caput and | | | | Uni-ZAP XR |
| | corpus | corpus | | | | |
| H0550 | H. Epididiymus, cauda | Human Epididiymus, cauda | | | | Uni-ZAP XR |
| H0551 | Human Thymus Stromal | Human Thymus Stromal Cells | | | | pCMVSport 3.0 |
| | Cells | | | | | |
| H0553 | Human Placenta | Human Placenta | | | | pCMVSport 3.0 |
| H0555 | Rejected Kidney, lib 4 | Human Rejected Kidney | Kidney | | disease | pCMVSport 3.0 |
| H0556 | Activated T- | T-Cells | Blood | Cell Line | | Uni-ZAP XR |
| | cell(12 h)/Thiouridine-re- | | | | | |
| | excision | | | | | |
| H0559 | HL-60, PMA 4 H, re- | HL-60 Cells, PMA stimulated | Blood | Cell Line | | Uni-ZAP XR |
| | excision | 4H | | | | |
| H0560 | KMH2 | KMH2 | | | | pCMVSport 3.0 |
| H0561 | L428 | L428 | | | | pCMVSport 3.0 |
| H0563 | Human Fetal Brain, | Human Fetal Brain | | | | pCMVSport 2.0 |
| | normalized 50021F | | | | | |
| H0564 | Human Fetal Brain, | Human Fetal Brain | | | | pCMVSport 2.0 |
| | normalized C5001F | | | | | |
| H0566 | Human Fetal | Human Fetal Brain | | | | pCMVSport 2.0 |
| | Brain, normalized c50F | | | | | |
| H0567 | Human Fetal Brain, | Human Fetal Brain | | | | pCMVSport 2.0 |
| | normalized A5002F | | | | | |
| H0569 | Human Fetal Brain, | Human Fetal Brain | | | | pCMVSport 2.0 |
| | normalized CO | | | | | |
| H0570 | Human Fetal Brain, | Human Fetal Brain | | | | pCMVSport 2.0 |
| | normalized C500H | | | | | |
| H0571 | Human Fetal Brain, | Human Fetal Brain | | | | pCMVSport 2.0 |
| | normalized C500HE | | | | | |
| H0572 | Human Fetal Brain, | Human Fetal Brain | | | | PCMVSport 2.0 |
| | normalized AC5002 | | | | | |
| H0574 | Hepatocellular Tumor; re- | Hepatocellular Tumor | Liver | | disease | Lambda Zap II |
| | excision | | | | | |
| H0575 | Human Adult | Human Adult Pulmonary | Lung | | | Uni-ZAP XR |
| | Pulmonary; re-excision | | | | | |
| H0576 | Resting T-Cell; re- | T-Cells | Blood | Cell Line | | Lambda ZAP II |
| | excision | | | | | |
| H0578 | Human Fetal Thymus | Fetal Thymus | Thymus | | | pSport1 |
| H0580 | Dendritic cells, pooled | Pooled dendritic cells | | | | pCMVSport 3.0 |
| H0581 | Human Bone Marrow, | Human Bone Marrow | Bone Marrow | | | pCMVSport 3.0 |
| | treated | | | | | |
| H0583 | B Cell lymphoma | B Cell Lymphoma | B Cell | | disease | pCMVSport 3.0 |
| H0585 | Activated T-Cells, 12 hrs, | Activated T-Cells | Blood | Cell Line | | Uni-ZAP XR |
| | re-excision | | | | | |
| H0586 | Healing groin wound, 6.5 | healing groin wound, 6.5 hours | groin | | disease | pCMVSport 3.0 |
| | hours post incision | post incision - 2/ | | | | |
| H0587 | Healing groin wound; 7.5 | Groin-2/19/97 | groin | | disease | pCMVSport 3.0 |
| | hours post incision | | | | | |
| H0589 | CD34 positive cells (cord | CD34 Positive Cells | Cord Blood | | | ZAP Express |
| | blood), re-ex | | | | | |
| H0590 | Human adult small | Human Adult Small Intestine | Small Int. | | | Uni-ZAP XR |
| | intestine, re-excision | | | | | |
| H0591 | Human T-cell | T-Cell Lymphoma | T-Cell | | disease | Uni-ZAP XR |
| | lymphoma; re-excision | | | | | |
| H0592 | Healing groin wound - | HGS wound healing project; | | | disease | pCMVSport 3.0 |
| | zero hr post-incision | abdomen | | | | |
| | (control) | | | | | |
| H0593 | Olfactory | Olfactory epithelium from roof | | | | pCMVSport 3.0 |
| | epithelium; nasalcavity | of left nasal cacit | | | | |
| H0594 | Human Lung Cancer; re- | Human Lung Cancer | Lung | | disease | Lambda ZAP II |
| | excision | | | | | |
| H0595 | Stomach cancer | Stomach Cancer - 5383A | | | disease | Uni-ZAP XR |
| | (human); re-excision | (human) | | | | |
| H0596 | Human Colon Cancer; re- | Human Colon Cancer | Colon | | | Lambda ZAP II |
| | excision | | | | | |
| H0597 | Human Colon; re-excision | Human Colon | | | | Lambda ZAP II |
| H0598 | Human Stomach; re- | Human Stomach | Stomach | | | Uni ZAP XR |
| | excision | | | | | |
| H0599 | Human Adult Heart; re- | Human Adult Heart | Heart | | | Uni-ZAP XR |
| | excision | | | | | |
| H0600 | Healing Abdomen | Abdomen | | | disease | pCMVSport 3.0 |
| | wound; 70&90 min post | | | | | |
| | incision | | | | | |
| H0601 | Healing Abdomen | Abdomen | | | disease | pCMVSport 3.0 |
| | Wound; 15 days post | | | | | |
| | incision | | | | | |
| H0602 | Healing Abdomen | Abdomen | | | disease | pCMVSport 3.0 |
| | Wound; 21&29 days post | | | | | |
| | incision | | | | | |
| H0604 | Human Pituitary, re- | Human Pituitary | | | | pBluescript |
| | excision | | | | | |
| H0606 | Human Primary Breast | Human Primary Breast Cancer | Breast | | disease | Uni-ZAP XR |
| | Cancer; re-excision | | | | | |
| H0613 | H. Leukocytes, normalized | H. Leukocytes | | | | pCMVSport 1 |
| | cot 5B | | | | | |
| H0614 | H. Leukocytes, | H. Leukocytes | | | | pCMVSport 1 |
| | normalized cot 500 A | | | | | |
| H0615 | Human Ovarian Cancer | Ovarian Cancer | Ovary | | disease | Uni-ZAP XR |
| | Reexcision | | | | | |
| H0616 | Human Testes, Reexcision | Human Testes | Testis | | | Uni-ZAP XR |
| H0617 | Human Primary Breast | Human Primary Breast Cancer | Breast | | disease | Uni-ZAP XR |
| | Cancer Reexcision | | | | | |
| H0618 | Human Adult Testes, | Human Adult Testis | Testis | | | Uni-ZAP XR |
| | Large Inserts, Reexcision | | | | | |
| H0619 | Fetal Heart | Human Fetal Heart | Heart | | | Uni-ZAP XR |
| H0620 | Human Fetal Kidney; | Human Fetal Kidney | Kidney | | | Uni-ZAP XR |
| | Reexcision | | | | | |
| H0622 | Human Pancreas Tumor; | Human Pancreas Tumor | Pancreas | | disease | Uni-ZAP XR |
| | Reexcision | | | | | |
| H0623 | Human Umbilical Vein; | Human Umbilical Vein | Umbilical vein | | | Uni-ZAP XR |
| | Reexcision | Endothelial Cells | | | | |
| H0624 | 12 Week Early Stage | Twelve Week Old Early Stage | Embryo | | | Uni-ZAP XR |
| | Human II; Reexcision | Human | | | | |
| H0625 | Ku 812F Basophils Line | Ku 812F Basophils | | | | pSport1 |
| H0626 | Saos2 Cells; Untreated | Saos2 Cell Line; Untreated | | | | pSport1 |
| H0627 | Saos2 Cells; Vitamin D3 | Saos2 Cell Line; Vitamin D3 | | | | pSport1 |
| | Treated | Treated | | | | |
| H0628 | Human Pre-Differentiated | Human Pre-Differentiated | | | | Uni-ZAP XR |
| | Adipocytes | Adipocytes | | | | |
| H0631 | Saos2, Dexamethosome | Saos2 Cell Line; | | | | pSport1 |
| | Treated | Dexamethosome Treated | | | | |
| H0632 | Hepatocellular Tumor; re- | Hepatocellular Tumor | Liver | | | Lambda ZAP II |
| | excision | | | | | |
| H0633 | Lung Carcinoma A549 | TNFalpha activated A549 - | | | disease | pSport1 |
| | TNFalpha activated | Lung Carcinoma | | | | |
| H0634 | Human Testes Tumor, re- | Human Testes Tumor | Testis | | disease | Uni-ZAP XR |
| | excision | | | | | |
| H0635 | Human Activated T-Cells, | Activated T-Cells | Blood | Cell Line | | Uni-ZAP XR |
| | re-excision | | | | | |
| H0637 | Dendritic Cells From | Dentritic cells from CD34 cells | | | | pSport1 |
| | CD34 Cells | | | | | |
| H0638 | CD40 activated monocyte | CD40 activated monocyte | | | | pSport1 |
| | dendridic cells | dendridic cells | | | | |
| H0640 | Ficolled Human Stromal | Ficolled Human Stromal Cells, | | | | Other |
| | Cells, Untreated | Untreated | | | | |
| H0641 | LPS activated derived | LPS activated monocyte | | | | pSport1 |
| | dendritic cells | derived dendritic cells | | | | |
| H0642 | Hep G2 Cells, lambda | Hep G2 Cells | | | | Other |
| | library | | | | | |
| H0643 | Hep G2 Cells, PCR | Hep G2 Cells | | | | Other |
| | library | | | | | |
| H0644 | Human Placenta (re- | Human Placenta | Placenta | | | Uni-ZAP XR |
| | excision) | | | | | |
| H0645 | Fetal Heart, re-excision | Human Fetal Heart | Heart | | | Uni-ZAP XR |
| H0646 | Lung, Cancer (4005313A3): | Metastatic squamous cell lung | | | | pSport1 |
| | Invasive Poorly | carcinoma, poorly di | | | | |
| | Differentiated Lung | | | | | |
| | Adenocarcinoma, | | | | | |
| H0647 | Lung, Cancer (4005163B7): | Invasive poorly differentiated | | | disease | pSport1 |
| | Invasive, Poorly | lung adenocarcinoma | | | | |
| | Diff. Adenocarcinoma, | | | | | |
| | Metastatic | | | | | |
| H0648 | Ovary, Cancer: (4004562B6) | Papillary Cstic neoplasm of | | | disease | pSport1 |
| | Papillary Serous | low malignant potentia | | | | |
| | Cystic Neoplasm, Low | | | | | |
| | Malignant Pot | | | | | |
| H0649 | Lung, Normal: (4005313B1) | Normal Lung | | | | pSport1 |
| H0650 | B-Cells | B-Cells | | | | pCMVSport 3.0 |
| H0651 | Ovary, Normal: | Normal Ovary | | | | pSport1 |
| | (9805C040R) | | | | | |
| H0652 | Lung, Normal: (4005313B1) | Normal Lung | | | | pSport1 |
| H0653 | Stromal Cells | Stromal Cells | | | | pSport1 |
| H0656 | B-cells (unstimulated) | B-cells (unstimulated) | | | | pSport1 |
| H0657 | B-cells (stimulated) | B-cells (stimulated) | | | | pSport1 |
| H0658 | Ovary, Cancer | 9809C332-Poorly differentiate | Ovary & | | disease | pSport1 |
| | (9809C332): Poorly | | Fallopian Tubes | | | |
| | differentiated | | | | | |
| | adenocarcinoma | | | | | |
| H0659 | Ovary, Cancer | Grade II Papillary Carcinoma, | Ovary | | disease | pSport1 |
| | (15395A1F): Grade II | Ovary | | | | |
| | Papillary Carcinoma | | | | | |
| H0660 | Ovary, Cancer: | Poorly differentiated | | | disease | pSport1 |
| | (15799A1F) Poorly | carcinoma, ovary | | | | |
| | differentiated carcinoma | | | | | |
| H0661 | Breast, Cancer: (4004943A5) | Breast cancer | | | disease | pSport1 |
| H0662 | Breast, Normal: | Normal Breast - #4005522(B2) | Breast | | | pSport1 |
| | (4005522B2) | | | | | |
| H0663 | Breast, Cancer: (4005522A2) | Breast Cancer - #4005522(A2) | Breast | | disease | pSport1 |
| H0664 | Breast, Cancer: | Breast Cancer | Breast | | disease | pSport1 |
| | (9806C012R) | | | | | |
| H0665 | Stromal cells 3.88 | Stromal cells 3.88 | | | | pSport1 |
| H0666 | Ovary, Cancer: (4004332A2) | Ovarian Cancer, Sample | | | disease | pSport1 |
| | | #4004332A2 | | | | |
| H0667 | Stromal cells(HBM3.18) | Stromal cell(HBM 3.18) | | | | pSport1 |
| H0668 | stromal cell clone 2.5 | stromal cell clone 2.5 | | | | pSport1 |
| H0670 | Ovary, Cancer(4004650A3): | Ovarian Cancer - 4004650A3 | | | | pSport1 |
| | Well-Differentiated | | | | | |
| | Micropapillary Serous | | | | | |
| | Carcinoma | | | | | |
| H0672 | Ovary, Cancer: (4004576A8) | Ovarian Cancer(4004576A8) | Ovary | | | pSport1 |
| H0673 | Human Prostate Cancer, | Human Prostate Cancer, stage | Prostate | | | Uni-ZAP XR |
| | Stage B2; re-excision | B2 | | | | |
| H0674 | Human Prostate Cancer, | Human Prostate Cancer, stage C | Prostate | | | Uni-ZAP XR |
| | Stage C; re-excission | | | | | |
| H0675 | Colon, Cancer: | Colon Cancer 9808C064R | | | | pCMVSport 3.0 |
| | (9808C064R) | | | | | |
| H0677 | TNFR degenerate oligo | B-Cells | | | | PCRII |
| H0678 | screened clones from | Placenta | Placenta | | | Other |
| | placental library | | | | | |
| H0682 | Serous Papillary | serous papillary | | | | pCMVSport 3.0 |
| | Adenocarcinoma | adenocarcinoma | | | | |
| | | (9606G304SPA3B) | | | | |
| H0683 | Ovarian Serous Papillary | Serous papillary | | | | pCMVSport 3.0 |
| | Adenocarcinoma | adenocarcinoma, stage 3C | | | | |
| | | (9804G01 | | | | |
| H0684 | Serous Papillary | Ovarian Cancer-9810G606 | Ovaries | | | pCMVSport 3.0 |
| | Adenocarcinoma | | | | | |
| H0685 | Adenocarcinoma of | Adenocarcinoma of Ovary, | | | | pCMVSport 3.0 |
| | Ovary, Human Cell Line, | Human Cell Line, # OVCAR- | | | | |
| | # OVCAR-3 | | | | | |
| H0686 | Adenocarcinoma of | Adenocarcinoma of Ovary, | | | | pCMVSport 3.0 |
| | Ovary, Human Cell Line | Human Cell Line, # SW-626 | | | | |
| H0687 | Human normal | Human normal | Ovary | | | pCMVSport 3.0 |
| | ovary(#9610G215) | ovary(#9610G215) | | | | |
| H0688 | Human Ovarian | Human Ovarian | | | | pCMVSport 3.0 |
| | Cancer(#9807G017) | cancer(#9807G017), mRNA | | | | |
| | | from Maura Ru | | | | |
| H0689 | Ovarian Cancer | Ovarian Cancer, #9806G019 | | | | pCMVSport 3.0 |
| H0690 | Ovarian Cancer, #9702G001 | Ovarian Cancer, #9702G001 | | | | pCMVSport 3.0 |
| H0691 | Normal Ovary, | normal ovary, #9710G208 | | | | pCMVSport 3.0 |
| | #9710G208 | | | | | |
| H0693 | Normal Prostate | Normal Prostate Tissue # | | | | pCMVSport 3.0 |
| | #ODQ3958EN | 0DQ3958EN | | | | |
| H0694 | Prostate gland | Prostate gland, | prostate gland | | | pCMVSport 3.0 |
| | adenocarcinoma | adenocarcinoma, mod/diff, | | | | |
| | | gleason | | | | |
| H0695 | mononucleocytes from | mononucleocytes from patient | | | | pCMVSport 3.0 |
| | patient | at Shady Grove Hospit | | | | |
| N0009 | Human Hippocampus, | Human Hippocampus | | | | |
| | prescreened | | | | | |
| S0001 | Brain frontal cortex | Brain frontal cortex | Brain | | | Lambda ZAP II |
| S0002 | Monocyte activated | Monocyte-activated | blood | Cell Line | | Uni-ZAP XR |
| S0003 | Human Osteoclastoma | Osteoclastoma | bone | | disease | Uni-ZAP XR |
| S0004 | Prostate | Prostate BPH | Prostate | | | Lambda ZAP II |
| S0006 | Neuroblastoma | Human Neural Blastoma | | | disease | pCDNA |
| S0007 | Early Stage Human Brain | Human Fetal Brain | | | | Uni-ZAP XR |
| S0010 | Human Amygdala | Amygdala | | | | Uni-ZAP XR |
| S0011 | STROMAL - | Osteoclastoma | bone | | disease | Uni-ZAP XR |
| | OSTEOCLASTOMA | | | | | |
| S0013 | Prostate | Prostate | prostate | | | Uni-ZAP XR |
| S0014 | Kidney Cortex | Kidney cortex | Kidney | | | Uni-ZAP XR |
| S0015 | Kidney medulla | Kidney medulla | Kidney | | | Uni-ZAP XR |
| S0016 | Kidney Pyramids | Kidney pyramids | Kidney | | | Uni-ZAP XR |
| S0022 | Human Osteoclastoma | Osteoclastoma Stromal Cells | | | | Uni-ZAP XR |
| | Stromal Cells - | | | | | |
| | unamplified | | | | | |
| S0024 | Human Kidney Medulla - | Human Kidney Medulla | | | | |
| | unamplified | | | | | |
| S0026 | Stromal cell TF274 | stromal cell | Bone marrow | Cell Line | | Uni-ZAP XR |
| S0027 | Smooth muscle, serum | Smooth muscle | Pulmanary artery | Cell Line | | Uni-ZAP XR |
| | treated | | | | | |
| S0028 | Smooth muscle, control | Smooth muscle | Pulmanary artery | Cell Line | | Uni-ZAP XR |
| S0029 | brain stem | Brain stem | brain | | | Uni-ZAP XR |
| S0031 | Spinal cord | Spinal cord | spinal cord | | | Uni-ZAP XR |
| 30032 | Smooth muscle-ILb | Smooth muscle | Pulmanary artery | Cell Line | | Uni-ZAP XR |
| | induced | | | | | |
| S0036 | Human Substantia Nigra | Human Substantia Nigra | | | | Uni-ZAP XR |
| 30037 | Smooth muscle, IL1b | Smooth muscle | Pulmanary artery | Cell Line | | Uni-ZAP XR |
| | induced | | | | | |
| S0038 | Human Whole Brain #2 - | Human Whole Brain #2 | | | | ZAP Express |
| | Oligo dT > 1.5 Kb | | | | | |
| S0039 | Hypothalamus | Hypothalamus | Brain | | | Uni-ZAP XR |
| S0040 | Adipocytes | Human Adipocytes from | | | | Uni-ZAP XR |
| | | Osteoclastoma | | | | |
| S0044 | Prostate BPH | prostate BPH | Prostate | | disease | Uni-ZAP XR |
| S0045 | Endothelial cells-control | Endothelial cell | endothelial cell- | Cell Line | | Uni-ZAP XR |
| | | | lung | | | |
| S0046 | Endothelial-induced | Endothelial cell | endothelial cell- | Cell Line | | Uni-ZAP XR |
| | | | lung | | | |
| S0048 | Human Hypothalamus, | Human Hypothalamus, | | | disease | Uni-ZAP XR |
| | Alzheimer''s | Alzheimer''s | | | | |
| S0049 | Human Brain, Striatum | Human Brain, Striatum | | | | Uni-ZAP XR |
| S0050 | Human Frontal Cortex, | Human Frontal Cortex, | | | disease | Uni-ZAP XR |
| | Schizophrenia | Schizophrenia | | | | |
| S0051 | Human | Human Hypothalamus, | | | disease | Uni-ZAP XR |
| | Hypothalmus, Schizophrenia | Schizophrenia | | | | |
| S0052 | neutrophils control | human neutrophils | blood | Cell Line | | Uni-ZAP XR |
| S0053 | Neutrophils IL-1 and LPS | human neutrophil induced | blood | Cell Line | | Uni-ZAP XR |
| | induced | | | | | |
| S0106 | STRIATUM | | BRAIN | | disease | Uni-ZAP XR |
| | DEPRESSION | | | | | |
| S0110 | Brain Amygdala | | Brain | | disease | Uni-ZAP XR |
| | Depression | | | | | |
| S0112 | Hypothalamus | | Brain | | | Uni-ZAP XR |
| S0114 | Anergic T-cell | Anergic T-cell | | Cell Line | | Uni-ZAP XR |
| S0116 | Bone marrow | Bone marrow | Bone marrow | | | Uni-ZAP XR |
| S0124 | Smooth muscle-edited A | Smooth muscle | Pulmanary artery | Cell Line | | Uni-ZAP XR |
| S0126 | Osteoblasts | Osteoblasts | Knee | Cell Line | | Uni-ZAP XR |
| S0132 | Epithelial-TNFa and INF | Airway Epithelial | | | | Uni-ZAP XR |
| | induced | | | | | |
| S0134 | Apoptotic T-cell | apoptotic cells | | Cell Line | | Uni-ZAP XR |
| S0136 | PERM TF274 | stromal cell | Bone marrow | Cell Line | | Lambda ZAP II |
| S0140 | eosinophil-IL5 induced | eosinophil | lung | Cell Line | | Uni-ZAP XR |
| S0142 | Macrophage-oxLDL | macrophage-oxidized LDL | blood | Cell Line | | Uni-ZAP XR |
| | | treated | | | | |
| S0144 | Macrophage (GM-CSF | Macrophage (GM-CSF treated) | | | | Uni-ZAP XR |
| | treated) | | | | | |
| S0146 | prostate-edited | prostate BPH | Prostate | | | Uni-ZAP XR |
| S0148 | Normal Prostate | Prostate | prostate | | | Uni-ZAP XR |
| S0150 | LNCAP prostate cell line | LNCAP Cell Line | Prostate | Cell Line | | Uni-ZAP XR |
| S0152 | PC3 Prostate cell line | PC3 prostate cell line | | | | Uni-ZAP XR |
| S0190 | Prostate BPH, Lib 2, | Human Prostate BPH | | | | pSport1 |
| | subtracted | | | | | |
| S0192 | Synovial Fibroblasts | Synovial Fibroblasts | | | | pSport1 |
| | (control) | | | | | |
| S0194 | Synovial hypoxia | Synovial Fibroblasts | | | | pSport1 |
| S0196 | Synovial IL-1/TNF | Synovial Fibroblasts | | | | pSport1 |
| | stimulated | | | | | |
| S0206 | Smooth Muscle-HASTE | Smooth muscle | Pulmanary artery | Cell Line | | pBluescript |
| | normalized | | | | | |
| S0210 | Messangial cell, frac 2 | Messangial cell | | | | pSport1 |
| S0212 | Bone Marrow Stromal | Bone Marrow Stromal | | | | pSport1 |
| | Cell, untreated | Cell, untreated | | | | |
| S0214 | Human Osteoclastoma, re- | Osteoclastoma | bone | | disease | Uni-ZAP XR |
| | excision | | | | | |
| S0216 | Neutrophils IL-1 and LPS | human neutrophil induced | blood | Cell Line | | Uni-ZAP XR |
| | induced | | | | | |
| S0218 | Apoptotic T-cell, re- | apoptotic cells | | Cell Line | | Uni-ZAP XR |
| | excision | | | | | |
| S0220 | H. hypothalamus, frac | Hypothalamus | Brain | | | ZAP Express |
| | A; re-excision | | | | | |
| S0222 | H. Frontal | H. Brain, Frontal Cortex, | Brain | | disease | Uni-ZAP XR |
| | cortex, epileptic; re- | Epileptic | | | | |
| | excision | | | | | |
| S0242 | Synovial Fibroblasts | Synovial Fibroblasts | | | | pSport1 |
| | (II1/TNF), subt | | | | | |
| S0250 | Human Osteoblasts II | Human Osteoblasts | Femur | | disease | pCMVSport 2.0 |
| S0260 | Spinal Cord, re-excision | Spinal cord | spinal cord | | | Uni-ZAP XR |
| S0276 | Synovial hypoxia-RSF | Synovial fobroblasts | Synovial tissue | | | pSport1 |
| | subtracted | (rheumatoid) | | | | |
| S0278 | H Macrophage (GM-CSF | Macrophage (GM-CSF treated) | | | | Uni-ZAP XR |
| | treated), re-excision | | | | | |
| S0280 | Human Adipose Tissue, | Human Adipose Tissue | | | | Uni-ZAP XR |
| | re-excision | | | | | |
| S0282 | Brain Frontal Cortex, re- | Brain frontal cortex | Brain | | | Lambda ZAP II |
| | excision | | | | | |
| S0294 | Larynx tumor | Larynx tumor | Larynx, vocal | | disease | pSport1 |
| | | | cord | | | |
| S0298 | Bone marrow | Bone marrow stroma, treatedSB | Bone marrow | | | pSport1 |
| | stroma, treated | | | | | |
| S0300 | Frontal lobe, dementia; re- | Frontal Lobe | Brain | | | Uni-ZAP XR |
| | excision | dementia/Alzheimer''s | | | | |
| S0312 | Human | Human osteoarthritic cartilage | | | diease | pSport1 |
| | osteoarthritic; fraction II | | | | | |
| S0314 | Human | Human osteoarthritic cartilage | | | diease | pSport1 |
| | osteoarthritis; fraction I | | | | | |
| S0328 | Palate carcinoma | Palate carcinoma | Uvula | | disease | pSport1 |
| S0330 | Palate normal | Palate normal | Uvula | | | pSport1 |
| S0332 | Pharynx carcinoma | Pharynx carcinoma | Hypopharynx | | | pSport1 |
| S0334 | Human Normal Cartilage | Human Normal Cartilage | | | | pSport1 |
| | Fraction III | | | | | |
| S0336 | Human Normal Cartilage | Human Normal Cartilage | | | | pSport1 |
| | Fraction IV | | | | | |
| S0338 | Human Osteoarthritic | Human osteoarthritic cartilage | | | disease | pSport1 |
| | Cartilage Fraction III | | | | | |
| S0342 | Adipocytes; re-excision | Human Adipocytes from | | | | Uni-ZAP XR |
| | | Osteoclastoma | | | | |
| S0344 | Macrophage-oxLDL; re- | macrophage-oxidized LDL | blood | Cell Line | | Uni-ZAP XR |
| | excision | treated | | | | |
| S0346 | Human Amygdala; re- | Amygdala | | | | Uni-ZAP XR |
| | excision | | | | | |
| S0350 | Pharynx Carcinoma | Pharynx carcinoma | Hypopharynx | | disease | pSport1 |
| S0354 | Colon Normal II | Colon Normal | Colon | | | pSport1 |
| S0356 | Colon Carcinoma | Colon Carcinoma | Colon | | disease | pSport1 |
| S0358 | Colon Normal III | Colon Normal | Colon | | | pSport1 |
| S0360 | Colon Tumor II | Colon Tumor | Colon | | disease | pSport1 |
| S0364 | Human Quadriceps | Quadriceps muscle | | | | pSport1 |
| S0366 | Human Soleus | Soleus Muscle | | | | pSport1 |
| S0368 | Human Pancreatic | Islets of Langerhans | | | | pSport1 |
| | Langerhans | | | | | |
| S0372 | Larynx carcinoma III | Larynx carcinoma | | | disease | pSport1 |
| S0374 | Normal colon | Normal colon | | | | pSport1 |
| S0376 | Colon Tumor | Colon Tumor | | | disease | pSport1 |
| S0378 | Pancreas normal PCA4 | Pancreas Normal PCA4 No | | | | pSport1 |
| | No | | | | | |
| S0380 | Pancreas Tumor PCA4 Tu | Pancreas Tumor PCA4 Tu | | | disease | pSport1 |
| S0386 | Human Whole Brain, re- | Whole brain | Brain | | | ZAP Express |
| | excision | | | | | |
| S0388 | Human | Human Hypothalamus, | | | disease | Uni-ZAP XR |
| | Hypothalamus, schizophrenia, | Schizophrenia | | | | |
| | re-excision | | | | | |
| S0390 | Smooth muscle, control; | Smooth muscle | Pulmanary artery | Cell Line | | Uni-ZAP XR |
| | re-excision | | | | | |
| S0392 | Salivary Gland | Salivary gland; normal | | | | pSport1 |
| S0394 | Stomach; normal | Stomach; normal | | | | pSport1 |
| S0398 | Testis; normal | Testis; normal | | | | pSport1 |
| S0404 | Rectum normal | Rectum, normal | | | | pSport1 |
| S0406 | Rectum tumour | Rectum tumour | | | | pSport1 |
| S0408 | Colon, normal | Colon, normal | | | | pSport1 |
| S0410 | Colon, tumour | Colon, tumour | | | | pSport1 |
| S0412 | Temporal cortex- | Temporal cortex, alzheimer | | | disease | Other |
| | Alzheizmer; subtracted | | | | | |
| S0414 | Hippocampus, Alzheimer | Hippocampus, Alzheimer | | | | Other |
| | Subtracted | Subtracted | | | | |
| S0418 | CHME Cell Line; treated 5 hrs | CHME Cell Line; treated | | | | pCMVSport 3.0 |
| S0420 | CHME Cell | CHME Cell line, untreatetd | | | | pSport1 |
| | Line, untreated | | | | | |
| S0422 | Mo7e Cell Line GM-CSF | Mo7e Cell Line GM-CSF | | | | pCMVSport 3.0 |
| | treated (1 ng/ml) | treated (1 ng/ml) | | | | |
| S0424 | TF-1 Cell Line GM-CSF | TF-1 Cell Line GM-CSF | | | | pSport1 |
| | Treated | Treated | | | | |
| S0426 | Monocyte activated; re- | Monocyte-activated | blood | Cell Line | | Uni-ZAP XR |
| | excision | | | | | |
| S0428 | Neutrophils control; re- | human neutrophils | blood | Cell Line | | Uni-ZAP XR |
| | excision | | | | | |
| S0430 | Aryepiglottis Normal | Aryepiglottis Normal | | | | pSport1 |
| S0432 | Sinus piniformis Tumour | Sinus piniformis Tumour | | | | pSport1 |
| S0434 | Stomach Normal | Stomach Normal | | | disease | pSport1 |
| S0436 | Stomach Tumour | Stomach Tumour | | | disease | pSport1 |
| S0438 | Liver Normal Met5No | Liver Normal Met5No | | | | pSport1 |
| S0440 | Liver Tumour Met 5 Tu | Liver Tumour | | | | pSport1 |
| S0442 | Colon Normal | Colon Normal | | | | pSport1 |
| S0444 | Colon Tumor | Colon Tumour | | | disease | pSport1 |
| S0446 | Tongue Tumour | Tongue Tumour | | | | pSport1 |
| S0448 | Larynx Normal | Larynx Normal | | | | pSport1 |
| S0450 | Larynx Tumour | Larynx Tumour | | | | pSport1 |
| S0452 | Thymus | Thymus | | | | pSport1 |
| S0454 | Placenta | Placenta | Placenta | | | pSport1 |
| S0456 | Tongue Normal | Tongue Normal | | | | pSport1 |
| S0458 | Thyroid Normal (SDCA2 | Thyroid normal | | | | pSport1 |
| | No) | | | | | |
| S0460 | Thyroid Tumour | Thyroid Tumour | | | | pSport1 |
| S0462 | Thyroid Thyroiditis | Thyroid Thyroiditis | | | | pSport1 |
| S0470 | Adenocarcinoma | PYFD | | | disease | pSport1 |
| S0474 | Human blood platelets | Platelets | Blood platelets | | | Other |
| S0665 | Human Amygdala; re- | Amygdala | | | | Uni-ZAP XR |
| | excission | | | | | |
| S3012 | Smooth Muscle Serum | Smooth muscle | Pulmanary artery | Cell Line | | pBluescript |
| | Treated, Norm | | | | | |
| S3014 | Smooth muscle, serum | Smooth muscle | Pulmanary artery | Cell Line | | pBluescript |
| | induced, re-exc | | | | | |
| S6014 | H. hypothalamus, frac A | Hypothalamus | Brain | | | ZAP Express |
| S6022 | H. Adipose Tissue | Human Adipose Tissue | | | | Uni-ZAP XR |
| S6024 | Alzheimers, spongy | Alzheimer''s/Spongy change | Brain | | disease | Uni-ZAP XR |
| | change | | | | | |
| S6026 | Frontal Lobe, Dementia | Frontal Lobe | Brain | | | Uni-ZAP XR |
| | | dementia/Alzheimer''s | | | | |
| S6028 | Human Manic Depression | Human Manic depression | Brain | | disease | Uni-ZAP XR |
| | Tissue | tissue | | | | |
| T0002 | Activated T-cells | Activated T-Cell, PBL fraction | Blood | Cell Line | | pBluescript SK- |
| T0004 | Human White Fat | Human White Fat | | | | pBluescript SK- |
| T0006 | Human Pineal Gland | Human Pinneal Gland | | | | pBluescript SK- |
| T0010 | Human Infant Brain | Human Infant Brain | | | | Other |
| T0040 | HSC172 cells | SA172 Cells | | | | pBluescript SK- |
| T0041 | Jurkat T-cell G1 phase | Jurkat T-cell | | | | pBluescript SK- |
| T0042 | Jurkat T-Cell, S phase | Jurkat T-Cell Line | | | | pBluescript SK- |
| T0048 | Human Aortic | Human Aortic Endothilium | | | | pBluescript SK- |
| | Endothelium | | | | | |
| T0049 | Aorta endothelial cells + TNF-a | Aorta endothelial cells | | | | pBluescript SK- |
| T0060 | Human White Adipose | Human White Fat | | | | pBluescript SK- |
| T0067 | Human Thyroid | Human Thyroid | | | | pBluescript SK- |
| T0068 | Normal Ovary, | Normal Ovary, Premenopausal | | | | pBluescript SK- |
| | Premenopausal | | | | | |
| T0069 | Human Uterus, normal | Human Uterus, normal | | | | pBluescript SK- |
| T0071 | Human Bone Marrow | Human Bone Marrow | | | | pBluescript SK- |
| T0082 | Human Adult Retina | Human Adult Retina | | | | pBluescript SK- |
| T0103 | Human colon carcinoma | | | | | pBluescript SK- |
| | (HCC) cell line | | | | | |
| T0104 | HCC cell line metastisis | | | | | pBluescript SK- |
| | to liver | | | | | |
| T0109 | Human (HCC) cell line | | | | | pBluescript SK- |
| | liver (mouse) metastasis, | | | | | |
| | remake | | | | | |
| T0110 | Human colon carcinoma | | | | | pBluescript SK- |
| | (HCC) cell line, remake | | | | | |
| T0114 | Human (Caco-2) cell line, | | | | | pBluescript SK- |
| | adenocarcinoma, colon, | | | | | |
| | remake | | | | | |
| T0115 | Human Colon Carcinoma | | | | | pBluescript SK- |
| | (HCC) cell line | | | | | |
| L0005 | Clontech human aorta | | | | | |
| | polyA+ mRNA (#6572) | | | | | |
| L0018 | Human (M. Lovett) | | | | | |
| L0021 | Human adult (K. Okubo) | | | | | |
| L0022 | Human adult lung 3″ | | | | | |
| | directed MboI cDNA | | | | | |
| L0040 | Human colon mucosa | | | | | |
| L0041 | Human epidermal | | | | | |
| | keratinocyte | | | | | |
| L0045 | Human keratinocyte | | | | | |
| | differential display | | | | | |
| | (B. Lin) | | | | | |
| L0053 | Human pancreatic tumor | | | | | |
| L0055 | Human promyelocyte | | | | | |
| L0060 | Human thymus NSTH II | | | | | |
| L0065 | Liver HepG2 cell line. | | | | | |
| L0070 | Selected chromosome 21 | | | | | |
| | cDNA library | | | | | |
| L0105 | Human aorta polyA+ | aorta | | | | |
| | (TFujiwara) | | | | | |
| L0142 | Human placenta cDNA | placenta | | | | |
| | (TFujiwara) | | | | | |
| L0157 | Human fetal brain | | brain | | | |
| | (TFujiwara) | | | | | |
| L0163 | Human heart cDNA | | heart | | | |
| | (YNakamura) | | | | | |
| L0183 | Human HeLa cells | | | HeLa | | |
| | (M. Lovett) | | | | | |
| L0194 | Human pancreatic cancer | pancreatic cancer | | Patu 8988t | | |
| | cell line Patu 8988t | | | | | |
| L0351 | Infant brain, Bento Soares | | | | | BA, M13-derived |
| L0352 | Normalized infant brain, | | | | | BA, M13-derived |
| | Bento Soares | | | | | |
| L0355 | P, Human foetal Brain | | | | | Bluescript |
| | Whole tissue | | | | | |
| L0356 | S, Human foetal Adrenals | | | | | Bluescript |
| | tissue | | | | | |
| L0361 | Stratagene ovary | | ovary | | | Bluescript SK |
| | (#937217) | | | | | |
| L0362 | Stratagene ovarian cancer | | | | | Bluescript SK- |
| | (#937219) | | | | | |
| L0363 | NCI_CGAP_GC2 | germ cell tumor | | | | Bluescript SK- |
| L0364 | NCI_CGAP_GC5 | germ cell tumor | | | | Bluescript SK- |
| L0366 | Stratagene schizo brain | schizophrenic brain S-11 | | | | Bluescript SK- |
| | S11 | frontal lobe | | | | |
| L0367 | NCI_CGAP_Sch1 | Schwannoma tumor | | | | Bluescript SK- |
| L0369 | NCI_CGAP_AA1 | adrenal adenoma | adrenal gland | | | Bluescript SK- |
| L0370 | Johnston frontal cortex | pooled frontal lobe | brain | | | Bluescript SK- |
| L0371 | NCI_CGAP_Br3 | breast tumor | breast | | | Bluescript SK- |
| L0372 | NCI_CGAP_Co12 | colon tumor | colon | | | Bluescript SK- |
| L0373 | NCI_CGAP_Co11 | tumor | colon | | | Bluescript SK- |
| L0374 | NCI_CGAP_Co2 | tumor | colon | | | Bluescript SK- |
| L0375 | NCI_CGAP_Kid6 | kidney tumor | kidney | | | Bluescript SK- |
| L0376 | NCI_CGAP_Lar1 | larynx | larynx | | | Bluescript SK- |
| L0378 | NCI_CGAP_Lu1 | lung tumor | lung | | | Bluescript SK- |
| L0381 | NCI_CGAP_HN4 | squamous cell carcinoma | pharynx | | | Bluescript SK- |
| L0382 | NCI_CGAP_Pr25 | epithelium (cell line) | prostate | | | Bluescript SK- |
| L0383 | NCI_CGAP_Pr24 | invasive tumor (cell line) | prostate | | | Bluescript SK- |
| L0384 | NCI_CGAP_Pr23 | prostate tumor | prostate | | | Bluescript SK- |
| L0386 | NCI_CGAP_HN3 | squamous cell carcinoma from | tongue | | | Bluescript SK- |
| | | base of tongue | | | | |
| L0387 | NCI_CGAP_GCB0 | germinal center B-cells | tonsil | | | Bluescript SK- |
| L0388 | NCI_CGAP_HN6 | normal gingiva (cell line from | | | | Bluescript SK- |
| | | immortalized kerati | | | | |
| L0411 | 1-NIB | | | | | Lafmid BA |
| L0415 | b4HB3MA Cot8-HAP-Ft | | | | | Lafmid BA |
| L0435 | Infant brain, LLNL array | | | | | lafmid BA |
| | of Dr. M. Soares 1NIB | | | | | |
| L0438 | normalized infant brain | total brain | brain | | | lafmid BA |
| | cDNA | | | | | |
| L0439 | Soares infant brain 1NIB | | whole brain | | | Lafmid BA |
| L0454 | Clontech adult human fat | | | | | lambda gt10 |
| | cell library HL1108A | | | | | |
| L0455 | Human retina cDNA | retina | eye | | | lambda gt10 |
| | randomly primed | | | | | |
| | sublibrary | | | | | |
| L0456 | Human retina cDNA | retina | eye | | | lambda gt10 |
| | Tsp509I-cleaved | | | | | |
| | sublibrary | | | | | |
| L0462 | WATM1 | | | | | lambda gt11 |
| L0463 | fetal brain cDNA | brain | brain | | | lambda gt11 |
| L0471 | Human fetal heart, | | | | | Lambda ZAP |
| | Lambda ZAP Express | | | | | Express |
| L0475 | KG1-a Lambda Zap | | | KG1-a | | Lambda ZAP |
| | Express cDNA library | | | | | Express (Stratagene) |
| L0476 | Fetal brain, Stratagene | | | | | Lambda ZAP II |
| L0480 | Stratagene cat#937212 | | | | | Lambda ZAP, |
| | (1992) | | | | | pBluescript SK(−) |
| L0481 | CD34+ DIRECTIONAL | | | | | Lambda ZAPII |
| L0483 | Human pancreatic islet | | | | | Lambda ZAPII |
| L0485 | STRATAGENE Human | skeletal muscle | leg muscle | | | Lambda ZAPII |
| | skeletal muscle cDNA | | | | | |
| | library, cat. #936215. | | | | | |
| L0493 | NCI_CGAP_Ov26 | papillary serous carcinoma | ovary | | | pAMP1 |
| L0497 | NCI_CGAP_HSC4 | CD34+, CD38− from normal | bone marrow | | | pAMP1 |
| | | bone marrow donor | | | | |
| L0499 | NCI_CGAP_HSC2 | stem cell 34+/38+ | bone marrow | | | pAMP1 |
| L0500 | NCI_CGAP_Brn20 | oligodendroglioma | brain | | | pAMP1 |
| L0506 | NCI_CGAP_Br16 | lobullar carcinoma in situ | breast | | | pAMP1 |
| L0509 | NCI_CGAP_Lu26 | invasive adenocarcinoma | lung | | | pAMP1 |
| L0510 | NCI_CGAP_Ov33 | borderline ovarian carcinoma | ovary | | | pAMP1 |
| L0511 | NCI_CGAP_Ov34 | borderline ovarian carcinoma | ovary | | | pAMP1 |
| L0514 | NCI_CGAP_Ov31 | papillary serous carcinoma | ovary | | | pAMP1 |
| L0515 | NCI_CGAP_Ov32 | papillary serous carcinoma | ovary | | | pAMP1 |
| L0517 | NCI_CGAP_Pr1 | | | | | pAMP10 |
| L0518 | NCI_CGAP_Pr2 | | | | | pAMP10 |
| L0519 | NCI_CGAP_Pr3 | | | | | pAMP10 |
| L0520 | NCI_CGAP_Alv1 | alveolar rhabdomyosarcoma | | | | pAMP10 |
| L0521 | NCI_CGAP_Ew1 | Ewing''s sarcoma | | | | pAMP10 |
| L0522 | NCI_CGAP_Kid1 | kidney | | | | pAMP10 |
| L0526 | NCI_CGAP_Pr12 | metastatic prostate bone lesion | | | | pAMP10 |
| L0527 | NCI_CGAP_Ov2 | ovary | | | | pAMP10 |
| L0528 | NCI_CGAP_Pr5 | prostate | | | | pAMP10 |
| L0529 | NCI_CGAP_Pr6 | prostate | | | | pAMP10 |
| L0530 | NCI_CGAP_Pr8 | prostate | | | | pAMP10 |
| L0532 | NCI_CGAP_Thy1 | thyroid | | | | pAMP10 |
| L0534 | Chromosome 7 Fetal | brain | brain | | | pAMP10 |
| | Brain cDNA Library | | | | | |
| L0539 | Chromosome 7 Placental | | placenta | | | pAMP10 |
| | cDNA Library | | | | | |
| L0540 | NCI_CGAP_Pr10 | invasive prostate tumor | prostate | | | pAMP10 |
| L0553 | NCI_CGAP_Co22 | colonic adenocarcinoma | colon | | | pAMP10 |
| L0558 | NCI_CGAP_Ov40 | endometrioid ovarian | ovary | | | pAMP10 |
| | | metastasis | | | | |
| L0559 | NCI_CGAP_Ov39 | papillary serous ovarian | ovary | | | pAMP10 |
| | | metastasis | | | | |
| L0560 | NCI_CGAP_HN12 | moderate to poorly | tongue | | | pAMP10 |
| | | differentiated invasive carcino | | | | |
| L0561 | NCI_CGAP_HN11 | normal squamous epithelium | tongue | | | pAMP10 |
| L0562 | Chromosome 7 HeLa | | | HeLa cell line; | | pAMP10 |
| | cDNA Library | | | ATCC | | |
| L0564 | Jia bone marrow stroma | bone marrow stroma | | | | pBluescript |
| L0565 | Normal Human | Bone | Hip | | | pBluescript |
| | Trabecular Bone Cells | | | | | |
| L0581 | Stratagene liver | | liver | | | pBluescript SK |
| | (#937224) | | | | | |
| L0586 | HTCDL1 | | | | | pBluescript SK(−) |
| L0588 | Stratagene endothelial cell | | | | | pBluescript SK- |
| | 937223 | | | | | |
| L0589 | Stratagene fetal retina | | | | | pBluescript SK- |
| | 937202 | | | | | |
| L0590 | Stratagene fibroblast | | | | | pBluescript SK- |
| | (#937212) | | | | | |
| L0591 | Stratagene HeLa cell s3 | | | | | pBluescript SK- |
| | 937216 | | | | | |
| L0592 | Stratagene hNT neuron | | | | | pBluescript SK- |
| | (#937233) | | | | | |
| L0593 | Stratagene | | | | | pBluescript SK- |
| | neuroepithelium | | | | | |
| | (#937231) | | | | | |
| L0594 | Stratagene | | | | | pBluescript SK- |
| | neuroepithelium | | | | | |
| | NT2RAMI 937234 | | | | | |
| L0595 | Stratagene NT2 neuronal | neuroepithelial cells | brain | | | pBluescript SK- |
| | precursor 937230 | | | | | |
| L0596 | Stratagene colon | | colon | | | pBluescript SK- |
| | (#937204) | | | | | |
| L0598 | Morton Fetal Cochlea | cochlea | ear | | | pBluescript SK- |
| L0599 | Stratagene lung (#937210) | | lung | | | pBluescript SK- |
| L0600 | Weizmann Olfactory | olfactory epithelium | nose | | | pBluescript SK- |
| | Epithelium | | | | | |
| L0601 | Stratagene pancreas | | pancreas | | | pBluescript SK- |
| | (#937208) | | | | | |
| L0602 | Pancreatic Islet | pancreatic islet | pancreas | | | pBluescript SK- |
| L0603 | Stratagene placenta | | placenta | | | pBluescript SK- |
| | (#937225) | | | | | |
| L0604 | Stratagene muscle 937209 | muscle | skeletal muscle | | | pBluescript SK- |
| L0605 | Stratagene fetal spleen | fetal spleen | spleen | | | pBluescript SK- |
| | (#937205) | | | | | |
| L0606 | NCI_CGAP_Lym5 | follicular lymphoma | lymph node | | | pBluescript SK- |
| L0608 | Stratagene lung carcinoma | lung carcinoma | lung | NCI-H69 | | pBluescript SK- |
| | 937218 | | | | | |
| L0611 | Schiller meningioma | meningioma | brain | | | pBluescript SK- |
| | | | | | | (Stratagene) |
| L0615 | 22 week old human fetal | | | | | pBluescriptII SK(−) |
| | liver cDNA library | | | | | |
| L0617 | Chromosome 22 exon | | | | | pBluescriptIIKS+ |
| L0622 | HM1 | | | | | pcDNAII |
| | | | | | | (Invitrogen) |
| L0623 | HM3 | pectoral muscle (after | | | | pcDNAII |
| | | mastectomy) | | | | (Invitrogen) |
| L0625 | NCI_CGAP_AR1 | bulk alveolar tumor | | | | pCMV-SPORT2 |
| L0629 | NCI_CGAP_Me13 | metastatic melanoma to bowel | bowel (skin | | | pCMV-SPORT4 |
| | | | primary) | | | |
| L0630 | NCI_CGAP_CNS1 | substantia nigra | brain | | | pCMV-SPORT4 |
| L0632 | NCI_CGAP_Li5 | hepatic adenoma | liver | | | pCMV-SPORT4 |
| L0633 | NCI_CGAP_Lu6 | small cell carcinoma | lung | | | pCMV-SPORT4 |
| L0635 | NCI_CGAP_PNS1 | dorsal root ganglion | peripheral | | | pCMV-SPORT4 |
| | | | nervous system | | | |
| L0636 | NCI_CGAP_Pit1 | four pooled pituitary adenomas | brain | | | pCMV-SPORT6 |
| L0637 | NCI_CGAP_Brn53 | three pooled meningiomas | brain | | | pCMV-SPORT6 |
| L0638 | NCI_CGAP_Brn35 | tumor, 5 pooled (see | brain | | | pCMV-SPORT6 |
| | | description) | | | | |
| L0639 | NCI_CGAP_Brn52 | tumor, 5 pooled (see | brain | | | pCMV-SPORT6 |
| | | description) | | | | |
| L0640 | NCI_CGAP_Br18 | four pooled high-grade tumors, | breast | | | pCMV-SPORT6 |
| | | including two prima | | | | |
| L0641 | NCI_CGAP_Co17 | juvenile granulosa tumor | colon | | | pCMV-SPORT6 |
| L0642 | NCI_CGAP_Co18 | moderately differentiated | colon | | | pCMV-SPORT6 |
| | | adenocarcinoma | | | | |
| L0643 | NCI_CGAP_Co19 | moderately differentiated | colon | | | pCMV-SPORT6 |
| | | adenocarcinoma | | | | |
| L0644 | NCI_CGAP_Co20 | moderately differentiated | colon | | | pCMV-SPORT6 |
| | | adenocarcinoma | | | | |
| L0645 | NCI_CGAP_Co21 | moderately differentiated | colon | | | pCMV-SPORT6 |
| | | adenocarcinoma | | | | |
| L0646 | NCI_CGAP_Co14 | moderately-differentiated | colon | | | pCMV-SPORT6 |
| | | adenocarcinoma | | | | |
| L0647 | NCI_CGAP_Sar4 | five pooled sarcomas, | connective tissue | | | pCMV-SPORT6 |
| | | including myxoid liposarcoma | | | | |
| L0648 | NCI_CGAP_Eso2 | squamous cell carcinoma | esophagus | | | pCMV-SPORT6 |
| L0649 | NCI_CGAP_GU1 | 2 pooled high-grade | genitourinary | | | pCMV-SPORT6 |
| | | transitional cell tumors | tract | | | |
| L0650 | NCI_CGAP_Kid13 | 2 pooled Wilms'' tumors, one | kidney | | | pCMV-SPORT6 |
| | | primary and one metast | | | | |
| L0651 | NCI_CGAP_Kid8 | renal cell tumor | kidney | | | pCMV-SPORT6 |
| L0652 | NCI_CGAP_Lu27 | four pooled poorly- | lung | | | pCMV-SPORT6 |
| | | differentiated adenocarcinomas | | | | |
| L0653 | NCI_CGAP_Lu28 | two pooled squamous cell | lung | | | pCMV-SPORT6 |
| | | carcinomas | | | | |
| L0654 | NCI_CGAP_Lu31 | | lung, cell line | | | pCMV-SPORT6 |
| L0655 | NCI_CGAP_Lym12 | lymphoma, follicular mixed | lymph node | | | pCMV-SPORT6 |
| | | small and large cell | | | | |
| L0656 | NCI_CGAP_Ov38 | normal epithelium | ovary | | | pCMV-SPORT6 |
| L0657 | NCI_CGAP_Ov23 | tumor, 5 pooled (see | ovary | | | pCMV-SPORT6 |
| | | description) | | | | |
| L0658 | NCI_CGAP_Ov35 | tumor, 5 pooled (see | ovary | | | pCMV-SPORT6 |
| | | description) | | | | |
| L0659 | NCI_CGAP_Pan1 | adenocarcinoma | pancreas | | | pCMV-SPORT6 |
| L0661 | NCI_CGAP_Mel15 | malignant melanoma, | skin | | | pCMV-SPORT6 |
| | | metastatic to lymph node | | | | |
| L0662 | NCI_CGAP_Gas4 | poorly differentiated | stomach | | | pCMV-SPORT6 |
| | | adenocarcinoma with signet r | | | | |
| L0663 | NCI_CGAP_Ut2 | moderately-differentiated | uterus | | | pCMV-SPORT6 |
| | | endometrial adenocarcino | | | | |
| L0664 | NCI_CGAP_Ut3 | poorly-differentiated | uterus | | | pCMV-SPORT6 |
| | | endometrial adenocarcinoma, | | | | |
| L0665 | NCI_CGAP_Ut4 | serous papillary carcinoma, | uterus | | | pCMV-SPORT6 |
| | | high grade, 2 pooled t | | | | |
| L0666 | NCI_CGAP_Ut1 | well-differentiated endometrial | uterus | | | pCMV-SPORT6 |
| | | adenocarcinoma, 7 | | | | |
| L0667 | NCI_CGAP_CML1 | myeloid cells, 18 pooled CML | whole blood | | | pCMV-SPORT6 |
| | | cases, BCR/ABL rearra | | | | |
| L0683 | Stanley Frontal NS pool 2 | frontal lobe (see description) | brain | | | pCR2.1-TOPO |
| | | | | | | (Invitrogen) |
| L0698 | Testis 2 | | | | | PGEM 5zf(+) |
| L0709 | NIH_MGC_21 | choriocarcinoma | placenta | | | pOTB7 |
| L0710 | NIH_MGC_7 | small cell carcinoma | lung | MGC3 | | pOTB7 |
| L0717 | Gessler Wilms tumor | | | | | pSPORT1 |
| L0718 | Testis 5 | | | | | pSPORT1 |
| L0731 | Soares_pregnant_uterus_{—} | | uterus | | | pT7T3-Pac |
| | NbHPU | | | | | |
| L0738 | Human colorectal cancer | | | | | pT7T3D |
| L0740 | Soares melanocyte | melanocyte | | | | pT7T3D |
| | 2NbHM | | | | | (Pharmacia) with a |
| | | | | | | modified polylinker |
| L0741 | Soares adult brain | | brain | | | pT7T3D |
| | N2b4HB55Y | | | | | (Pharmacia) with a |
| | | | | | | modified polylinker |
| L0742 | Soares adult brain | | brain | | | pT7T3D |
| | N2b5HB55Y | | | | | (Pharmacia) with a |
| | | | | | | modified polylinker |
| L0743 | Soares breast 2NbHBst | | breast | | | pT7T3D |
| | | | | | | (Pharmacia) with a |
| | | | | | | modified polylinker |
| L0744 | Soares breast 3NbHBst | | breast | | | pT7T3D |
| | | | | | | (Pharmacia) with a |
| | | | | | | modified polylinker |
| L0745 | Soares retina N2b4HR | retina | eye | | | pT7T3D |
| | | | | | | (Pharmacia) with a |
| | | | | | | modified polylinker |
| L0746 | Soares retina N2b5HR | retina | eye | | | pT7T3D |
| | | | | | | (Pharmacia) with a |
| | | | | | | modified polylinker |
| L0747 | Soares_fetal_heart_NbHH19W | | heart | | | pT7T3D |
| | | | | | | (Pharmacia) with a |
| | | | | | | modified polylinker |
| L0748 | Soares fetal liver spleen | | Liver and Spleen | | | pT7T3D |
| | 1NFLS | | | | | (Pharmacia) with a |
| | | | | | | modified polylinker |
| L0749 | Soares_fetal_liver_spleen_{—} | | Liver and Spleen | | | pT7T3D |
| | 1NFLS_S1 | | | | | (Pharmacia) with a |
| | | | | | | modified polylinker |
| L0750 | Soares_fetal_lung_NbHL19W | | lung | | | pT7T3D |
| | | | | | | (Pharmacia) with a |
| | | | | | | modified polylinker |
| L0751 | Soares ovary tumor | ovarian tumor | ovary | | | pT7T3D |
| | NbHOT | | | | | (Pharmacia) with a |
| | | | | | | modified polylinker |
| L0752 | Soares_parathyroid_tumor_{—} | parathyroid tumor | parathyroid gland | | | pT7T3D |
| | NbHPA | | | | | (Pharmacia) with a |
| | | | | | | modified polylinker |
| L0753 | Soares_pineal_gland_N3HPG | | pineal gland | | | pT7T3D |
| | | | | | | (Pharmacia) with a |
| | | | | | | modified polylinker |
| L0754 | Soares placenta Nb2HP | | placenta | | | pT7T3D |
| | | | | | | (Pharmacia) with a |
| | | | | | | modified polylinker |
| L0755 | Soares_placenta_8to9weeks_{—} | | placenta | | | pT7T3D |
| | 2NbHP8to9W | | | | | (Pharmacia) with a |
| | | | | | | modified polylinker |
| L0756 | Soares_multiple_sclerosis_{—} | multiple sclerosis lesions | | | | pT7T3D |
| | 2NbHMSP | | | | | (Pharmacia) with a |
| | | | | | | modified polylinker |
| | | | | | | V_TYPE |
| L0757 | Soares_senescent_fibroblasts_{—} | senescent fibroblast | | | | pT7T3D |
| | NbHSF | | | | | (Pharmacia) with a |
| | | | | | | modified polylinker |
| | | | | | | V_TYPE |
| L0758 | Soares_testis_NHT | | | | | pT7T3D-Pac |
| | | | | | | (Pharmacia) with a |
| | | | | | | modified polylinker |
| L0759 | Soares_total_fetus_Nb2HF8_{—} | | | | | pT7T3D-Pac |
| | 9w | | | | | (Pharmacia) with a |
| | | | | | | modified polylinker |
| L0761 | NCI_CGAP_CLL1 | B-cell, chronic lymphotic | | | | pT7T3D-Pac |
| | | leukemia | | | | (Pharmacia) with a |
| | | | | | | modified polylinker |
| L0762 | NCI_CGAP_Br1.1 | breast | | | | pT7T3D-Pac |
| | | | | | | (Pharmacia) with a |
| | | | | | | modified polylinker |
| L0763 | NCI_CGAP_Br2 | breast | | | | pT7T3D-Pac |
| | | | | | | (Pharmacia) with a |
| | | | | | | modified polylinker |
| L0764 | NCI_CGAP_Co3 | colon | | | | pT7T3D-Pac |
| | | | | | | (Pharmacia) with a |
| | | | | | | modified polylinker |
| L0766 | NCI_CGAP_GCB1 | germinal center B cell | | | | pT7T3D-Pac |
| | | | | | | (Pharmacia) with a |
| | | | | | | modified polylinker |
| L0767 | NCI_CGAP_GC3 | pooled germ cell tumors | | | | pT7T3D-Pac |
| | | | | | | (Pharmacia) with a |
| | | | | | | modified polylinker |
| L0768 | NCI_CGAP_GC4 | pooled germ cell tumors | | | | pT7T3D-Pac |
| | | | | | | (Pharmacia) with a |
| | | | | | | modified polylinker |
| L0769 | NCI_CGAP_Brn25 | anaplastic oligodendroglioma | brain | | | pT7T3D-Pac |
| | | | | | | (Pharmacia) with a |
| | | | | | | modified polylinker |
| L0770 | NCI_CGAP_Brn23 | glioblastoma (pooled) | brain | | | pT7T3D-Pac |
| | | | | | | (Pharmacia) with a |
| | | | | | | modified polylinker |
| L0771 | NCI_CGAP_Co8 | adenocarcinoma | colon | | | pT7T3D-Pac |
| | | | | | | (Pharmacia) with a |
| | | | | | | modified polylinker |
| L0772 | NCI_CGAP_Co10 | colon tumor RER+ | colon | | | pT7T3D-Pac |
| | | | | | | (Pharmacia) with a |
| | | | | | | modified polylinker |
| L0773 | NCI_CGAP_Co9 | colon tumor RER+ | colon | | | pT7T3D-Pac |
| | | | | | | (Pharmacia) with a |
| | | | | | | modified polylinker |
| L0774 | NCI_CGAP_Kid3 | | kidney | | | pT7T3D-Pac |
| | | | | | | (Pharmacia) with a |
| | | | | | | modified polylinker |
| L0775 | NCI_CGAP_Kid5 | 2 pooled tumors (clear cell | kidney | | | pT7T3D-Pac |
| | | type) | | | | (Pharmacia) with a |
| | | | | | | modified polylinker |
| L0776 | NCI_CGAP_Lu5 | carcinoid | lung | | | pT7T3D-Pac |
| | | | | | | (Pharmacia) with a |
| | | | | | | modified polylinker |
| L0777 | Soares_NhHMPu_S1 | Pooled human melanocyte, | mixed (see | | | pT7T3D-Pac |
| | | fetal heart, and pregnant | below) | | | (Pharmacia) with a |
| | | | | | | modified polylinker |
| L0779 | Soares_NFL_T_GBC_S1 | | pooled | | | pT7T3D-Pac |
| | | | | | | (Pharmacia) with a |
| | | | | | | modified polylinker |
| L0780 | Soares_NSF_F8_9W_OT_{—} | | pooled | | | pT7T3D-Pac |
| | PA_P_S1 | | | | | (Pharmacia) with a |
| | | | | | | modified polylinker |
| L0782 | NCI_CGAP_Pr21 | normal prostate | prostate | | | pT7T3D-Pac |
| | | | | | | (Pharmacia) with a |
| | | | | | | modified polylinker |
| L0783 | NCI_CGAP_Pr22 | normal prostate | prostate | | | pT7T3D-Pac |
| | | | | | | (Pharmacia) with a |
| | | | | | | modified polylinker |
| L0784 | NCI_CGAP_Lei2 | leiomyosarcoma | soft tissue | | | pT7T3D-Pac |
| | | | | | | (Pharmacia) with a |
| | | | | | | modified polylinker |
| L0785 | Barstead spleen HPLRB2 | | spleen | | | pT7T3D-Pac |
| | | | | | | (Pharmacia) with a |
| | | | | | | modified polylinker |
| L0786 | Soares_NbHFB | | whole brain | | | pT7T3D-Pac |
| | | | | | | (Pharmacia) with a |
| | | | | | | modified polylinker |
| L0787 | NCI_CGAP_Sub1 | | | | | pT7T3D-Pac |
| | | | | | | (Pharmacia) with a |
| | | | | | | modified polylinker |
| L0788 | NCI_CGAP_Sub2 | | | | | pT7T3D-Pac |
| | | | | | | (Pharmacia) with a |
| | | | | | | modified polylinker |
| L0789 | NCI_CGAP_Sub3 | | | | | pT7T3D-Pac |
| | | | | | | (Pharmacia) with a |
| | | | | | | modified polylinker |
| L0790 | NCI_CGAP_Sub4 | | | | | pT7T3D-Pac |
| | | | | | | (Pharmacia) with a |
| | | | | | | modified polylinker |
| L0791 | NCI_CGAP_Sub5 | | | | | pT7T3D-Pac |
| | | | | | | (Pharmacia) with a |
| | | | | | | modified polylinker |
| L0792 | NCI_CGAP_Sub6 | | | | | pT7T3D-Pac |
| | | | | | | (Pharmacia) with a |
| | | | | | | modified polylinker |
| L0793 | NCI_CGAP_Sub7 | | | | | pT7T3D-Pac |
| | | | | | | (Pharmacia) with a |
| | | | | | | modified polylinker |
| L0794 | NCI_CGAP_GC6 | pooled germ cell tumors | | | | pT7T3D-Pac |
| | | | | | | (Pharmacia) with a |
| | | | | | | modified polylinker |
| L0796 | NCI_CGAP_Brn50 | medulloblastoma | brain | | | pT7T3D-Pac |
| | | | | | | (Pharmacia) with a |
| | | | | | | modified polylinker |
| L0800 | NCI_CGAP_Co16 | colon tumor, RER+ | colon | | | pT7T3D-Pac |
| | | | | | | (Pharmacia) with a |
| | | | | | | modified polylinker |
| L0803 | NCI_CGAP_Kidi11 | | kidney | | | pT7T3D-Pac |
| | | | | | | (Pharmicia) with a |
| | | | | | | modified polylinker |
| L0804 | NCI_CGAP_Kid12 | 2 pooled tumors (clear cell | kidney | | | PT7T3D-Pac |
| | | type) | | | | (Pharmicia) With a |
| | | | | | | modified polylinker |
| L0805 | NCI_CGAP_Lu24 | carcinoid | lung | | | pT7T3D-Pac |
| | | | | | | (Pharmicia) With a |
| | | | | | | modified polylinker |
| L0806 | NCI_CGAP_Lu19 | squamous cell carcinoma, | lung | | | pT7T3D-Pac |
| | | poorly diferentiated (4 | | | | (Pharmicia) With a |
| | | | | | | modified polylinker |
| L0807 | NCI_CGAP_Ov18 | fibrotheoma | ovary | | | pT7T3D-Pac |
| | | | | | | (Pharmicia) With a |
| | | | | | | modified polylinker |
| L0809 | NCI_CGAP_Pr28 | | prostate | | | pT7T3D-Pac |
| | | | | | | (Pharmicia) With a |
| | | | | | | modified polylinker |
| L0811 | BATM2 | | | | | PTZ18 |
| L0946 | BT0333 | | breast | | | puc18 |
| L1942 | HT0452 | | head_neck | | | puc18 |
| L2138 | ST0186 | | stomach | | | puc18 |
| L2251 | Human fetal lung | Fetal lung | | | | |
| L2257 | NIH_MGC_65 | adenocarcinoma | colon | | | pCMV-SPORT6 |
| L2258 | NIH_MGC_67 | retinoblastoma | eye | | | pCMV-SPORT6 |
| L2260 | NIH_MGC_69 | large cell carcinoma, | lung | | | pCMV-SPORT6 |
| | | undifferentiated | | | | |
| L2261 | NIH_MGC_70 | epithelloid carcinoma | pancreas | | | pCMVSPORT6 |
| L2262 | NIH_MGC_72 | melanotic melanoma | skin | | | pCMV-SPORT6 |
| L2263 | NIH_MGC_66 | adenocarcinoma | ovary | | | pCMV-SPORT6 |
| L2265 | NIH_MGC_39 | adenocarcinoma | pancreas | | | pOTB7 |
| L2270 | Lupski_dorsal_root_ganglion | dorsal root ganglia | | | | pCMV-SPORT6 |
| | | | | | | (Life Technologies) |
| L2333 | CT0417 | | colon | | | puc18 |
| L2338 | CT0432 | | colon | | | puc18 |
| L2346 | CT0483 | | colon | | | puc18 |
| L2400 | NN0116 | | nervous_normal | | | puc18 |
| L2439 | NN1022 | | nervous_normal | | | puc18 |
| L2477 | HT0408 | | head_neck | | | puc18 |
| L2490 | HT0545 | | head_neck | | | puc18 |
| L2495 | HT0594 | | head_neck | | | puc18 |
| L2504 | HT0636 | | head_neck | | | puc18 |
| L2522 | HT0704 | | head_neck | | | puc18 |
| L2540 | HT0728 | | head_neck | | | puc18 |
| L2562 | HT0760 | | head_neck | | | puc18 |
| L2634 | HT0872 | | head_neck | | | puc18 |
| L2651 | NIH_MGC_20 | melanotic melanoma | skin | | | pOTB7 |
| L2653 | NIH_MGC_58 | hypernephroma | kidney | | | pDNR-LIB |
| | | | | | | (Clontech) |
| L2654 | NIH_MGC_9 | adenocarcinoma cell line | ovary | | | pOTB7 |
| L2655 | NIH_MGC_55 | from acute myelogenous | bone marrow | | | pDNR-LIB |
| | | leukemia | | | | (Clontech) |
| L2657 | NIH_MGC_54 | from chronic myelogenous | bone marrow | | | pDNR-LIB |
| | | leukemia | | | | (Clontech) |
| L2702 | NT0098 | | nervous_tumor | | | puc18 |
| L2804 | FT0103 | | prostate_tumor | | | puc18 |
| L2854 | UM0091 | | uterus | | | puc18 |
| L2884 | AN0041 | | amnion_normal | | | puc18 |
| L2906 | BN0047 | | breast_normal | | | puc18 |
| L3002 | BN0276 | | breast_normal | | | puc18 |
| L3019 | BN0303 | | breast_normal | | | puc18 |
| L3081 | ET0005 | | lung_tumor | | | puc18 |
| L3089 | ET0018 | | lung_tumor | | | puc18 |
| L3092 | ET0023 | | lung_tumor | | | puc18 |
| L3127 | ET0084 | | lung_tumor | | | puc18 |
| L3140 | MT0031 | | marrow | | | puc18 |
| L3154 | MT0050 | | marrow | | | puc18 |
| L3212 | OT0076 | | ovary | | | puc18 |
| L3215 | OT0083 | | ovary | | | puc18 |
| L3255 | FN0064 | | prostate_normal | | | puc18 |
| L3316 | FN0188 | | prostate_normal | | | puc18 |
| L3352 | TN0027 | | testis_normal | | | puc18 |
| L3374 | TN0070 | | testis_normal | | | puc18 |
| L3388 | GKC | hepatocellular carcinoma | | | | pBluescript sk(−) |
| L3391 | NIH_MGC_53 | carcinoma, cell line | bladder | | | pDNR-LIB |
| | | | | | | (Clontech) |
| L3504 | HT0873 | | head_neck | | | puc18 |
| L3521 | HT0919 | | head_neck | | | puc18 |
| L3603 | UM0093 | | uterus | | | puc18 |
| L3612 | UT0011 | | uterus_tumor | | | puc18 |
| L3636 | NIH_MGC_73 | | brain | | | pDNR-LIB |
| | | | | | | (Clontech) |
| L3643 | ADB | Adrenal gland | | | | pBluescript sk(−) |
| L3645 | Cu | adrenal cortico adenoma for | | | | pBluescript sk(−) |
| | | Cushing''s syndrome | | | | |
| L3649 | DCB | | | | | pTriplEx2 |
| L3655 | HTC | Hypothalamus | | | | pBluescript sk(−) |
| L3657 | HTF | Hypothalamus | | | | pBluescript sk(−) |
| L3658 | cdA | pheochromocytoma | | | | pTriplEx2 |
| L3659 | CB | cord blood | | | | pBluescript |
| L3811 | NPC | pituitary | | | | pBluescript sk(−) |
| L3815 | MDS | Bone marrow | | | | ptriplEx2 |
| L3817 | HEMBB1 | whole embryo, mainly body | | | | pME18SFL3 |
| L3823 | NT2RM1 | | | NT2 | | pUC19FL3 |
| L3827 | NT2RP2 | | | NT2 | | pME18SFL3 |
| L3828 | NT2RP3 | | | NT2 | | pME18SFL3 |
| L3829 | NT2RP4 | | | NT2 | | pME18SFL3 |
| L3831 | OVARC1 | ovary, tumor tissue | | | | pME18SFL3 |
| L3832 | PLACE1 | placenta | | | | pME18SFL3 |
| L3833 | PLACE2 | placenta | | | | pME18SFL3 |
| L3872 | NCI_CGAP_Skn1 | | skin, normal, 4 | | | pCMV-SPORT6 |
| | | | pooled sa | | | |
| L3904 | NCI_CGAP_Brn64 | glioblastoma with EGFR | brain | | | pCMV-SPORT6 |
| | | amplification | | | | |
| L3905 | NCI_CGAP_Brn67 | anaplastic oligodendroglioma | brain | | | pCMV-SPORT6 |
| | | with 1p/19q loss | | | | |
| L4497 | NCI_CGAP_Br22 | invasive ductal carcinoma, 3 | breast | | | pCMV-SPORT6 |
| | | pooled samples | | | | |
| L4501 | NCI_CGAP_Sub8 | | | | | pT7T3D-Pac |
| | | | | | | (Pharmacia) with a |
| | | | | | | modified polylinker |
| L4556 | NCI_CGAP_HN13 | squamous cell carcinoma | tongue | | | pCMV-SPORT6 |
| L4669 | NCI_CGAP_Ov41 | serous papillary tumor | ovary | | | pCMV-SPORT6 |
| L4747 | NCI_CGAP_Brn41 | oligodendroglioma | brain | | | pT7T3D-Pac |
| | | | | | | (Pharmacia) with a |
| | | | | | | modified polylinker |
| L5565 | NCI_CGAP_Brn66 | glioblastoma with probably | brain | | | pCMV-SPORT6 |
| | | TP53 mutation and witho | | | | |
| L5566 | NCI_CGAP_Brn70 | anaplastic oligodendroglioma | brain | | | pCMV- |
| | | | | | | SPORT6.ccdb |
| L5574 | NCI_CGAP_HN19 | normal epithelium | nasopharynx | | | pAMP10 |
| L5575 | NCI_CGAP_Brn65 | glioblastoma without EGFR | brain | | | pCMV-SPORT6 |
| | | amplification | | | | |
| L5622 | NCI_CGAP_Skn3 | | skin | | | pCMV-SPORT6 |
| L5623 | NCI_CGAP_Skn4 | squamous cell carcinoma | skin | | | pCMV-SPORT6 |

[0174] Description of Table 5

[0175] Table 5 provides a key to the OMIM reference identification numbers disclosed in Table 1B.1, column 9. OMIM reference identification numbers (Column 1) were derived from Online Mendelian Inheritance in Man (Online Mendelian Inheritance in Man, OMIM. McKusick-Nathans Institute for Genetic Medicine, Johns Hopkins University (Baltimore, Md.) and National Center for Biotechnology Information, National Library of Medicine, (Bethesda, Md.) 2000. World Wide Web URL: http://www.ncbi.nlm.nih.gov/omim/). Column 2 provides diseases associated with the cytologic band disclosed in Table 1B.1, column 8, as determined using the Morbid Map database.

TABLE 5

| OMIM | |
|---|---|
| Reference | Description |
| 101000 | Meningioma, NF2-related, sporadic Schwannoma, sporadic |
| 101000 | Neurofibromatosis, type 2 |
| 101000 | Neurolemmomatosis |
| 101000 | Malignant mesothelioma, sporadic |
| 102200 | Somatotrophinoma |
| 102772 | [AMP deaminase deficiency, erythrocytic] |
| 103600 | [Dysalbuminemic hyperthyroxinemia] |
| 103600 | [Dysalbuminemic hyperzincemia], 194470 |
| 103600 | Analbuminemia |
| 103850 | Aldolase A deficiency |
| 104150 | [AFP deficiency, congenital] |
| 104150 | [Hereditary persistence of alpha-fetoprotein] |
| 104500 | Amelogenesis imperfecta-2, hypoplastic local type |
| 104770 | Amyloidosis, secondary, susceptibility to |
| 106100 | Angioedema, hereditary |
| 106210 | Peters anomaly |
| 106210 | Cataract, congenital, with late-onset corneal dystrophy |
| 106210 | Foveal hypoplasia, isolated, 136520 |
| 106210 | Aniridia |
| 107271 | CD59 deficiency |
| 107300 | Antithrombin III deficiency |
| 107670 | Apolipoprotein A-II deficiency |
| 110700 | Vivax malaria, susceptibility to |
| 112261 | Fibrodysplasia ossificans progressiva |
| 114550 | Hepatocellular carcinoma |
| 114835 | Monocyte carboxyesterase deficiency |
| 115500 | Acatalasemia |
| 116800 | Cataract, Marner type |
| 116806 | Colorectal cancer |
| 116860 | Cavernous angiomatous malformations |
| 118485 | Polycystic ovary syndrome with hyperandrogenemia |
| 120070 | Alport syndrome, autosomal recessive, 203780 |
| 120131 | Alport syndrome, autosomal recessive, 203780 |
| 120131 | Hematuria, familial benign |
| 120140 | Osteoarthrosis, precocious |
| 120140 | SED congenita |
| 120140 | SMED Strudwick type |
| 120140 | Stickler syndrome, type I |
| 120140 | Wagner syndrome, type II |
| 120140 | Achondrogenesis-hypochondrogenesis, type II |
| 120140 | Kniest dysplasia |
| 120220 | Bethlem myopathy, 158810 |
| 120240 | Bethlem myopathy, 158810 |
| 120260 | Epiphyseal dysplasia, multiple, type 2, 600204 |
| 120550 | C1q deficiency, type A |
| 120570 | C1q deficiency, type B |
| 120575 | C1q deficiency, type C |
| 121800 | Corneal dystrophy, crystalline, Schnyder |
| 123000 | Craniometaphyseal dysplasia |
| 123580 | Cataract, congenital, autosomal dominant |
| 123620 | Cataract, cerulean, type 2, 601547 |
| 126060 | Anemia, megaloblastic, due to DHFR deficiency |
| 126090 | Hyperphenylalaninemia due to pterin-4a-carbinolamine |
| | dehydratase deficiency, 264070 |
| 126337 | Myxoid liposarcoma |
| 126600 | Doyne honeycomb retinal dystrophy |
| 126600 | Drusen, radial, autosomal dominant |
| 129010 | Neuropathy, congenital hypomyelinating, 1 |
| 129900 | EEC syndrome-1 |
| 130500 | Elliptocytosis-1 |
| 131100 | Multiple endocrine neoplasia I |
| 131100 | Prolactinoma, hyperparathyroidism, carcinoid syndrome |
| 131100 | Carcinoid tumor of lung |
| 131210 | Atherosclerosis, susceptibility to |
| 133200 | Erythrokeratodermia variabilis |
| 133701 | Exostoses, multiple, type 2 |
| 133780 | Vitreoretinopathy, exudative, familial |
| 135940 | Ichthyosis vulgaris, 146700 |
| 136132 | [Fish-odor syndrome], 602079 |
| 136435 | Ovarian dysgenesis, hypergonadotropic, with |
| | normal karyotype, 233300 |
| 136530 | Male infertility, familial |
| 138030 | [Hyperproglucagonemia] |
| 138140 | Glucose transport defect, blood-brain barrier |
| 138760 | [Glyoxalase II deficiency] |
| 138981 | Pulmonary alveolar proteinosis, 265120 |
| 140100 | [Anhaptoglobinemia] |
| 140100 | [Hypohaptogloginemia] |
| 142600 | Hemolytic anemia due to hexokinase deficiency |
| 143200 | Wagner syndrome |
| 143200 | Erosive vitreoretinopathy |
| 145001 | Hyperparathyroidism-jaw tumor syndrome |
| 146760 | [IgG receptor I, phagocytic, familial deficiency of] |
| 146790 | Lupus nephritis, susceptibility to |
| 147050 | Atopy |
| 148900 | Klippel-Feil syndrome with laryngeal malformation |
| 151385 | Leukemia, acute myeloid |
| 151390 | Leukemia, acute T-cell |
| 151670 | Hepatic lipase deficiency |
| 152445 | Vohwinkel syndrome, 124500 |
| 152445 | Erythrokeratoderma, progressive symmetric, 602036 |
| 153700 | Macular dystrophy, vitelliform type |
| 154545 | Chronic infections, due to opsonin defect |
| 155555 | [Red hair/fair skin] |
| 155555 | UV-induced skin damage, vulnerability to |
| 159001 | Muscular dystrophy, limb-girdle, type 1B |
| 160980 | Carney myxoma-endocrine complex |
| 161015 | Mitochondrial complex I deficiency, 252010 |
| 164009 | Leukemia, acute promyelocytic, NUMA/RARA type |
| 164500 | Spinocerebellar ataxia-7 |
| 164920 | Piebaldism |
| 164920 | Mast cell leukemia |
| 164920 | Mastocytosis with associated hematologic disorder |
| 168461 | Multiple myeloma, 254250 |
| 168461 | Parathyroid adenomatosis 1 |
| 168461 | Centrocytic lymphoma |
| 168468 | Metaphyseal chondrodysplasia, Murk Jansen type, 156400 |
| 168500 | Parietal foramina |
| 170650 | Periodontitis, juvenile |
| 171650 | Lysosomal acid phosphatase deficiency |
| 171760 | Hypophosphatasia, adult, 146300 |
| 171760 | Hypophosphatasia, infantile, 241500 |
| 171860 | Hemolytic anemia due to phosphofructokinase deficiency |
| 173610 | Platelet alpha/delta storage pool deficiency |
| 174000 | Medullary cystic kidney disease, AD |
| 174810 | Osteolysis, familial expansile |
| 176640 | Creutzfeldt-Jakob disease, 123400 |
| 176640 | Gerstmann-Straussler disease, 137440 |
| 176640 | Insomnia, fatal familial |
| 176880 | Protein S deficiency |
| 176930 | Dysprothrombinemia |
| 176930 | Hypoprothrombinemia |
| 178300 | Ptosis, hereditary congenital, 1 |
| 179615 | Reticulosis, familial histiocytic, 267700 |
| 179615 | Severe combined immunodeficiency, B cell-negative, 601457 |
| 179616 | Severe combined immunodeficiency, B cell-negative, 601457 |
| 179755 | Renal cell carcinoma, papillary, 1 |
| 180105 | Retinitis pigmentosa-10 |
| 180200 | Osteosarcoma, 259500 |
| 180200 | Pinealoma with bilateral retinoblastoma |
| 180200 | Retinoblastoma |
| 180200 | Bladder cancer, 109800 |
| 180385 | Leukemia, acute T-cell |
| 180721 | Retinitis pigmentosa, digenic |
| 180840 | Susceptibility to IDDM |
| 181510 | Schizophrenia |
| 182280 | Small-cell cancer of lung |
| 182860 | Pyropoikilocytosis |
| 182860 | Spherocytosis, recessive |
| 182860 | Elliptocytosis-2 |
| 186580 | Arthrocutaneouveal granulomatosis |
| 188826 | Sorsby fundus dystrophy, 136900 |
| 189800 | Preeclampsia/eclampsia |
| 190685 | Down syndrome |
| 191181 | Cervical carcinoma |
| 191315 | Insensitivity to pain, congenital, with anhidrosis, 256800 |
| 192090 | Ovarian carcinoma |
| 192090 | Breast cancer, lobular |
| 192090 | Endometrial carcinoma |
| 192090 | Gastric cancer, familial, 137215 |
| 193235 | Vitreoretinopathy, neovascular inflammatory |
| 193300 | Renal cell carcinoma |
| 193300 | von Hippel-Lindau syndrome |
| 194070 | Wilms tumor, type 1 |
| 194070 | Denys-Drash syndrome |
| 194070 | Frasier syndrome, 136680 |
| 208400 | Aspartylglucosaminuria |
| 209901 | Bardet-Biedl syndrome 1 |
| 212138 | Carnitine-acylcarnitine translocase deficiency |
| 216550 | Cohen syndrome |
| 222800 | Hemolytic anemia due to bisphosphoglycerate |
| | mutase deficiency |
| 222900 | Sucrose intolerance |
| 227646 | Fanconi anemia, type D |
| 227650 | Fanconi anemia, type A |
| 230800 | Gaucher disease |
| 230800 | Gaucher disease with cardiovascular calcification |
| 231675 | Glutaricaciduria, type IIC |
| 231680 | Glutaricaciduria, type IIA |
| 232500 | Glycogen storage disease IV |
| 232600 | McArdle disease |
| 233700 | Chronic granulomatous disease due to deficiency of NCF-1 |
| 236100 | Holoprosencephaly-1 |
| 236200 | Homocystinuria, B6-responsive and nonresponsive types |
| 236700 | McKusick-Kaufman syndrome |
| 240300 | Autoimmune polyglandular disease, type I |
| 245349 | Lacticacidemia due to PDX1 deficiency |
| 245900 | Norum disease |
| 245900 | Fish-eye disease |
| 249100 | Familial Mediterranean fever |
| 250850 | Hypermethioninemia, persistent, autosomal dominant, |
| | due to methionine adenosyltransferase I/III deficiency |
| 253000 | Mucopolysaccharidosis IVA |
| 253200 | Maroteaux-Lamy syndrome, several forms |
| 255800 | Schwartz-Jampel syndrome |
| 259700 | Osteopetrosis, recessive |
| 259770 | Osteoporosis-pseudoglioma syndrome |
| 259900 | Hyperoxaluria, primary, type 1 |
| 266200 | Anemia, hemolytic, due to PK deficiency |
| 266600 | Inflammatory bowel disease-1 |
| 267750 | Knobloch syndrome |
| 268800 | Sandhoff disease, infantile, juvenile, and adult forms |
| 268800 | Spinal muscular atrophy, HEXB-related |
| 272800 | Tay-Sachs disease |
| 272800 | [Hex A pseudodeficiency] |
| 272800 | GM2-gangliosidosis, juvenile, adult |
| 274180 | Thromboxane synthase deficiency |
| 276600 | Tyrosinemia, type II |
| 276700 | Tyrosinemia, type I |
| 300011 | Menkes disease, 309400 |
| 300011 | Occipital horn syndrome, 304150 |
| 300011 | Cutis laxa, neonatal |
| 300046 | Mental retardation, X-linked 23, nonspecific |
| 300047 | Mental retardation, X-linked 20 |
| 300067 | Subcortical laminar heterotopia, X-linked dominant |
| 300067 | Lissencephaly, X-linked |
| 300071 | Night blindness, congenital stationary, type 2 |
| 300075 | Coffin-Lowry syndrome, 303600 |
| 300077 | Mental retardation, X-linked 29 |
| 300110 | Night blindness, congenital stationary, X-linked |
| | incomplete, 300071 |
| 300121 | Subcortical laminal heteropia, X-linked, 300067 |
| 300121 | Lissencephaly, X-linked, 300067 |
| 300127 | Mental retardation, X-linked, 60 |
| 300600 | Ocular albinism, Forsius-Eriksson type |
| 301000 | Thrombocytopenia, X-linked, 313900 |
| 301000 | Wiskott-Aldrich syndrome |
| 301200 | Amelogenesis imperfecta |
| 301201 | Amelogenesis imperfecta-3, hypoplastic type |
| 301830 | Arthrogryposis, X-linked (spinal muscular atrophy, |
| | infantile, X-linked) |
| 301835 | Arts syndrome |
| 302350 | Nance-Horan syndrome |
| 302801 | Charcot-Marie-Tooth neuropathy, X-linked-2, recessive |
| 305435 | Heterocellular hereditary persistence of |
| | fetal hemoglobin, Swiss type |
| 305450 | FG syndrome |
| 306000 | Glycogenosis, X-linked hepatic, type I |
| 306000 | Glycogenosis, X-linked hepatic, type II |
| 307800 | Hypophosphatemia, hereditary |
| 308800 | Keratosis follicularis spinulosa decalvans |
| 309470 | Mental retardation, X-linked, syndromic-3, |
| | with spastic diplegia |
| 309500 | Renpenning syndrome-1 |
| 309510 | Mental retardation, X-linked, syndromic-1, with |
| | dystonic movements, ataxia, and seizures |
| 309605 | Mental retardation, X-linked, syndromic-4, with |
| | congenital contractures and low fingertip arches |
| 309610 | Mental retardation, X-linked, syndromic-2, with dysmorphism |
| | and cerebral atrophy |
| 309850 | Brunner syndrome |
| 311050 | Optic atrophy, X-linked |
| 311200 | Oral-facial-digital syndrome 1 |
| 311850 | Phosphoribosyl pyrophosphate synthetase-related gout |
| 312040 | N syndrome, 310465 |
| 312060 | Properdin deficiency, X-linked |
| 312170 | Pyruvate dehydrogenase deficiency |
| 312700 | Retinoschisis |
| 313400 | Spondyloepiphyseal dysplasia tarda |
| 313700 | Perineal hypospadias |
| 313700 | Prostate cancer |
| 313700 | Spinal and bulbar muscular atrophy of Kennedy, 313200 |
| 313700 | Breast cancer, male, with Reifenstein syndrome |
| 313700 | Androgen insensitivity, several forms |
| 314580 | Wieacker-Wolff syndrome |
| 600045 | Xeroderma pigmentosum, group E, subtype 2 |
| 600065 | Leukocyte adhesion deficiency, 116920 |
| 600079 | Colon cancer |
| 600151 | Bardet-Biedl syndrome 3 |
| 600163 | Long QT syndrome 3 |
| 600223 | Spinocerebellar ataxia-4 |
| 600319 | Diabetes mellitus, insulin-dependent, 4 |
| 600354 | Spinal muscular atrophy-1, 253300 |
| 600354 | Spinal muscular atrophy-2, 253550 |
| 600354 | Spinal muscular atrophy-3, 253400 |
| 600359 | Bartter syndrome, type 2 |
| 600374 | Bardet-Biedl syndrome 4 |
| 600528 | CPT deficiency, hepatic, type I, 255120 |
| 600623 | Prostate cancer, 176807 |
| 600631 | Enuresis, nocturnal, 1 |
| 600678 | Cancer susceptibility |
| 600760 | Pseudohypoaldosteronism, type I, 264350 |
| 600760 | Liddle syndrome, 177200 |
| 600761 | Pseudohypoaldosteronism, type I, 264350 |
| 600761 | Liddle syndrome, 177200 |
| 600795 | Dementia, familial, nonspecific |
| 600808 | Enuresis, nocturnal, 2 |
| 600811 | Xeroderma pigmentosum, group E, DDB-negative |
| | subtype, 278740 |
| 600850 | Schizophrenia disorder-4 |
| 600882 | Charcot-Marie-Tooth neuropathy-2B |
| 600887 | Endometrial carcinoma |
| 600897 | Cataract, zonular pulverulent-1, 116200 |
| 600900 | Muscular dystrophy, limb-girdle, type 2E |
| 600958 | Cardiomyopathy, familial hypertrophic, 4, 115197 |
| 600975 | Glaucoma 3, primary infantile, B |
| 601072 | Deafness, autosomal recessive 8 |
| 601105 | Pycnodysostosis, 265800 |
| 601145 | Epilepsy, progressive myoclonic 1, 254800 |
| 601284 | Hereditary hemorrhagic telangiectasia-2, 600376 |
| 601362 | DiGeorge syndrome/velocardiofacial syndrome complex-2 |
| 601386 | Deafness, autosomal recessive 12 |
| 601412 | Deafness, autosomal dominant 7 |
| 601493 | Cardiomyopathy, dilated 1C |
| 601567 | Combined factor V and VIII deficiency, 227300 |
| 601652 | Glaucoma 1A, primary open angle, juvenile-onset, 137750 |
| 601669 | Hirschsprung disease, one form |
| 601769 | Osteoporosis, involutional |
| 601769 | Rickets, vitamin D-resistant, 277440 |
| 601780 | Ceroid-lipofuscinosis, neuronal-6, variant late infantile |
| 601863 | Bare lymphocyte syndrome, complementation group C |
| 601884 | [High bone mass] |
| 601920 | Alagille syndrome, 118450 |
| 602080 | Paget disease of bone-2 |
| 602092 | Deafness, autosomal recessive 18 |
| 602116 | Glioma |
| 602491 | Hyperlipidemia, familial combined, 1 |
| 602568 | Homocystinuria-megaloblastic anemia, cbl E type, 236270 |
| 602574 | Deafness, autosomal dominant 12, 601842 |
| 602574 | Deafness, autosomal dominant 8,601543 |
| 602783 | Spastic paraplegia-7 |

[0176] Mature Polypeptides

[0177] The present invention also encompasses mature forms of a polypeptide having the amino acid sequence of SEQ ID NO:Y and/or the amino acid sequence encoded by the cDNA in a deposited clone. Polynucleotides encoding the mature forms (such as, for example, the polynucleotide sequence in SEQ ID NO:X and/or the polynucleotide sequence contained in the cDNA of a deposited clone) are also encompassed by the invention. Moreover, fragments or variants of these polypeptides (such as, fragments as described herein, polypeptides at least 80%, 85%, 90%, 95%, 96%, 97%, 98%, 99%, or 100% identical to these polypeptides, or polypeptides encoded by a polynucleotide that hybridizes under stringent conditions to the complementary strand of the polynucleotide encoding these polypeptides) are also encompassed by the invention. In preferred embodiments, these fragments or variants retain one or more functional acitivities of the full-length or mature form of the polypeptide (e.g., biological activity (such as, for example, activity useful in detecting, preventing, diagnosing, prognosticating, treating, and/or ameliorating gastrointestinal disorders), antigenicity (ability to bind, or compete with a polypeptide of the invention for binding, to an anti-polypeptide of the invention antibody), immunogenicity (ability to generate antibody which binds to a specific polypeptide of the invention), ability to form multimers with polypeptides of the invention, and ability to bind to a receptor or ligand for a polypeptide of the invention). Antibodies that bind the polypeptides of the invention, and polynucleotides encoding these polypeptides are also encompassed by the invention.

[0178] According to the signal hypothesis, proteins secreted by mammalian cells have a signal or secretary leader sequence which is cleaved from the mature protein once export of the growing protein chain across the rough endoplasmic reticulum has been initiated. Most mammalian cells and even insect cells cleave secreted proteins with the same specificity. However, in some cases, cleavage of a secreted protein is not entirely uniform, which results in two or more mature species of the protein. Further, it has long been known that cleavage specificity of a secreted protein is ultimately determined by the primary structure of the complete protein, that is, it is inherent in the amino acid sequence of the polypeptide.

[0179] Methods for predicting whether a protein has a signal sequence, as well as the cleavage point for that sequence, are available. For instance, the method of McGeoch, Virus Res. 3:271-286 (1985), uses the information from a short N-terminal charged region and a subsequent uncharged region of the complete (uncleaved) protein. The method of von Heinje, Nucleic Acids Res. 14:4683-4690 (1986) uses the information from the residues surrounding the cleavage site, typically residues −13 to +2, where +1 indicates the amino terminus of the secreted protein. The accuracy of predicting the cleavage points of known mammalian secretory proteins for each of these methods is in the range of 75-80%. (von Heinje, supra.) However, the two methods do not always produce the same predicted cleavage point(s) for a given protein.

[0180] In the present case, the deduced amino acid sequence of the secreted polypeptide was analyzed by a computer program called SignalP (Henrik Nielsen et al., Protein Engineering 10:1-6 (1997)), which predicts the cellular location of a protein based on the amino acid sequence. As part of this computational prediction of localization, the methods of McGeoch and von Heinje are incorporated. The analysis of the amino acid sequences of the secreted proteins described herein by this program provided the results shown in Table 1A.

[0181] In specific embodiments, polypeptides of the invention comprise, or alternatively consist of, the predicted mature form of the polypeptide as delineated in columns 14 and 15 of Table 1A. Moreover, fragments or variants of these polypeptides (such as, fragments as described herein, polypeptides at least 80%, 85%, 90%, 95%, 96%, 97%, 98%, 99%, or 100% identical to these polypeptides, or polypeptides encoded by a polynucleotide that hybridizes under stringent conditions to the complementary strand of the polynucleotide encoding these polypeptides) are also encompassed by the invention. In preferred embodiments, these fragments or variants retain one or more functional acitivities of the full-length or mature form of the polypeptide (e.g., biological activity (such as, for example, activity useful in detecting, preventing, diagnosing, prognosticating, treating, and/or ameliorating gastrointestinal disorders), antigenicity (ability to bind, or compete with a polypeptide of the invention for binding, to an anti-polypeptide of the invention antibody), immunogenicity (ability to generate antibody which binds to a specific polypeptide of the invention), ability to form multimers with polypeptides of the invention, and ability to bind to a receptor or ligand for a polypeptide of the invention). Antibodies that bind the polypeptides of the invention, and polynucleotides encoding these polypeptides are also encompassed by the invention.

[0182] Polynucleotides encoding proteins comprising, or consisting of, the predicted mature form of polypeptides of the invention (e.g., polynucleotides having the sequence of SEQ ID NO: X (Table 1A, column 4), the sequence delineated in columns 7 and 8 of Table 1A, and a sequence encoding the mature polypeptide delineated in,columns 14 and 15 of Table 1A (e.g., the sequence of SEQ ID NO:X encoding the mature polypeptide delineated in columns 14 and 15 of Table 1)) are also encompassed by the invention, as are fragments or variants of these polynucleotides (such as, fragments as described herein, polynucleotides at least 80%, 85%, 90%, 95%, 96%, 97%, 98%, 99%, or 100% identical to these polyncueotides, and nucleic acids which hybridizes under stringent conditions to the complementary strand of the polynucleotide).

[0183] As one of ordinary skill would appreciate, however, cleavage sites sometimes vary from organism to organism and cannot be predicted with absolute certainty. Accordingly, the present invention provides secreted polypeptides having a sequence shown in SEQ ID NO:Y which have an N-terminus beginning within 15 residues of the predicted cleavage point (i.e., having 1, 2, 3, 4, 5, 6, 7, 8 , 9, 10, 11, 12, 13, 14, or 15 more or less contiguous residues of SEQ ID NO:Y at the N-terminus when compared to the predicted mature form of the polypeptide (e.g., the mature polypeptide delineated in columns 14 and 15 of Table 1). Similarly, it is also recognized that in some cases, cleavage of the signal sequence from a secreted protein is not entirely uniform, resulting in more than one secreted species. These polypeptides, and the polynucleotides encoding such polypeptides, are contemplated by the present invention.

[0184] Moreover, the signal sequence identified by the above analysis may not necessarily predict the naturally occurring signal sequence. For example, the naturally occurring signal sequence may be further upstream from the predicted signal sequence. However, it is likely that the predicted signal sequence will be capable of directing the secreted protein to the ER. Nonetheless, the present invention provides the mature protein produced by expression of the polynucleotide sequence of SEQ ID NO:X and/or the polynucleotide sequence contained in the cDNA of a deposited clone, in a mammalian cell (e.g., COS cells, as desribed below). These polypeptides, and the polynucleotides encoding such polypeptides, are contemplated by the present invention.

[0185] Polynucleotide and Polypeptide Variants

[0186] The present invention is also directed to variants of the polynucleotide sequence disclosed in SEQ ID NO:X or the complementary strand thereto, nucleotide sequences encoding the polypeptide of SEQ ID NO:Y, the nucleotide sequence of SEQ ID NO:X that encodes the polypeptide sequence as defined in columns 13 and 14 of Table 1A, nucleotide sequences encoding the polypeptide sequence as defined in columns 13 and 14 of Table 1A, the nucleotide sequence of SEQ ID NO:X encoding the polypeptide sequence as defined in Table 1B, the nucleotide sequence as defined in columns 8 and 9 of Table 2, nucleotide sequences encoding the polypeptide encoded by the nucleotide sequence as defined in columns 8 and 9 of Table 2, the nucleotide sequence as defined in column 6 of Table 1C, nucleotide sequences encoding the polypeptide encoded by the nucleotide sequence as defined in column 6 of Table 1C, the cDNA sequence contained in ATCC Deposit No:Z, nucleotide sequences encoding the polypeptide encoded by the cDNA sequence contained in ATCC Deposit No:Z, and/or nucleotide sequences encoding a mature (secreted) polypeptide encoded by the cDNA sequence contained in ATCC Deposit No:Z.

[0187] The present invention also encompasses variants of the polypeptide sequence disclosed in SEQ ID NO:Y, the polypeptide as defined in columns 13 and 14 of Table 1A, the polypeptide sequence as defined in columns 6 and 7 of Table 1B.1, a polypeptide sequence encoded by the polynucleotide sequence in SEQ ID NO:X, a polypeptide sequence encoded by the nucleotide sequence as defined in columns 8 and 9 of Table 2, a polypeptide sequence encoded by the nucleotide sequence as defined in columns 6 of Table 1C, a polypeptide sequence encoded by the complement of the polynucleotide sequence in SEQ ID NO:X, the polypeptide sequence encoded by the cDNA sequence contained in ATCC Deposit No:Z and/or a mature (secreted) polypeptide encoded by the cDNA sequence contained in ATCC Deposit No:Z.

[0188] “Variant” refers to a polynucleotide or polypeptide differing from the polynucleotide or polypeptide of the present invention, but retaining essential properties thereof. Generally, variants are overall closely similar, and, in many regions, identical to the polynucleotide or polypeptide of the present invention.

[0189] Thus, one aspect of the invention provides an isolated nucleic acid molecule comprising, or alternatively consisting of, a polynucleotide having a nucleotide sequence selected from the group consisting of: (a) a nucleotide sequence described in SEQ ID NO:X or contained in the cDNA sequence of ATCC Deposit No:Z; (b) a nucleotide sequence in SEQ ID NO:X or the cDNA in ATCC Deposit No:Z which encodes the complete amino acid sequence of SEQ ID NO:Y or the complete amino acid sequence encoded by the cDNA in ATCC Deposit No:Z; (c) a nucleotide sequence in SEQ ID NO:X or the cDNA in ATCC Deposit No:Z which encodes a mature polypeptide (i.e., a secreted polypeptide (e.g., as delineated in columns 14 and 15 of Table 1A)); (d) a nucleotide sequence in SEQ ID,NO:X or the cDNA sequence of ATCC Deposit No:Z, which encodes a biologically active fragment of a polypeptide; (e) a nucleotide sequence in SEQ ID NO:X or the cDNA sequence of ATCC Deposit No:Z, which encodes an antigenic fragment of a polypeptide; (f) a nucleotide sequence encoding a polypeptide comprising the complete amino acid sequence of SEQ ID NO:Y or the complete amino acid sequence encoded by the cDNA in ATCC Deposit No:Z; (g) a nucleotide sequence encoding a mature polypeptide of the amino acid sequence of SEQ ID NO:Y (i.e., a secreted polypeptide (e.g., as delineated in columns 14 and 15 of Table 1A)) or a mature polypeptide of the amino acid sequence encoded by the cDNA in ATCC Deposit No:Z; (h) a nucleotide sequence encoding a biologically active fragment of a polypeptide having the complete amino acid sequence of SEQ ID NO:Y or the complete amino acid sequence encoded by the cDNA in ATCC Deposit No:Z; (i) a nucleotide sequence encoding an antigenic fragment of a polypeptide having the complete amino acid sequence of SEQ ID NO:Y or the complete amino acid sequence encoded by the cDNA in ATCC Deposit No:Z; and (j) a nucleotide sequence complementary to any of the nucleotide sequences in (a), (b), (c), (d), (e), (f), (g), (h), or (i) above.

[0190] The present invention is also directed to nucleic acid molecules which comprise, or alternatively consist of, a nucleotide sequence which is at least 80%, 85%, 90%, 95%, 96%, 97%, 98%, 99% or 100%, identical to, for example, any of the nucleotide sequences in (a), (b), (c), (d), (e), (f), (g), (h), (i), or (j) above, the nucleotide coding sequence in SEQ ID NO:X or the complementary strand thereto, the nucleotide coding sequence of the cDNA contained in ATCC Deposit No:Z or the complementary strand thereto, a nucleotide sequence encoding the polypeptide of SEQ ID NO:Y, a nucleotide sequence encoding a polypeptide sequence encoded by the nucleotide sequence in SEQ ID NO:X, a polypeptide sequence encoded by the complement of the polynucleotide sequence in SEQ ID NO:X, a nucleotide sequence encoding the polypeptide encoded by the cDNA contained in ATCC Deposit No:Z, the nucleotide coding sequence in SEQ ID NO:X as defined in columns 8 and 9 of Table 2 or the complementary strand thereto, a nucleotide sequence encoding the polypeptide encoded by the nucleotide sequence in SEQ ID NO:X as defined in columns 8 and 9 of Table 2 or the complementary strand thereto, the nucleotide coding sequence in SEQ ID NO:B as defined in column 6 of Table 1C or the complementary strand thereto, a nucleotide sequence encoding the polypeptide encoded by the nucleotide sequence in SEQ ID NO:B as defined in column 6 of Table 1C or the complementary strand thereto, the nucleotide sequence in SEQ ID NO:X encoding the polypeptide sequence as defined in columns 6 and 7 of Table 1B.1 or the complementary strand thereto, nucleotide sequences encoding the polypeptide as defined in column 6 and 7 of Table 1B.1 or the complementary strand thereto, and/or polynucleotide fragments of any of these nucleic acid molecules (e.g., those fragments described herein). Polynucleotides which hybridize to the complement of these nucleic acid molecules under stringent hybridization conditions or alternatively, under lower stringency conditions, are also encompassed by the invention, as are polypeptides encoded by these polynucleotides and nucleic acids.

[0191] In a preferred embodiment, the invention encompasses nucleic acid molecules which comprise, or alternatively, consist of a polynucleotide which hybridizes under stringent hybridization conditions, or alternatively, under lower stringency conditions, to a polynucleotide in (a), (b), (c), (d), (e), (f), (g), (h), or (i), above, as are polypeptides encoded by these polynucleotides. In another preferred embodiment, polynucleotides which hybridize to the complement of these nucleic acid molecules under stringent hybridization conditions, or alternatively, under lower stringency conditions, are also encompassed by the invention, as are polypeptides encoded by these polynucleotides.

[0192] In another embodiment, the invention provides a purified protein comprising, or alternatively consisting of, a polypeptide having an amino acid sequence selected from the group consisting of: (a) the complete amino acid sequence of SEQ ID NO:Y or the complete amino acid sequence encoded by the cDNA in ATCC Deposit No:Z; (b) the amino acid sequence of a mature (secreted) form of a polypeptide having the amino acid sequence of SEQ ID NO:Y (e.g., as delineated in columns 14 and 15 of Table 1A) or a mature form of the amino acid sequence encoded by the cDNA in ATCC Deposit No:Z mature; (c) the amino acid sequence of a biologically active fragment of a polypeptide having the complete amino acid sequence of SEQ ID NO:Y or the complete amino acid sequence encoded by the cDNA in ATCC Deposit No:Z; and (d) the amino acid sequence of an antigenic fragment of a polypeptide having the complete amino acid sequence of SEQ ID NO:Y or the complete amino acid sequence encoded by the cDNA in ATCC Deposit No:Z.

[0193] The present invention is also directed to proteins which comprise, or alternatively consist of, an amino acid sequence which is at least 80%, 85%, 90%, 95%, 96%, 97%, 98%, 99% or 100%, identical to, for example, any of the amino acid sequences in (a), (b), (c), or (d), above, the amino acid sequence shown in SEQ ID NO:Y, the amino acid sequence encoded by the cDNA contained in ATCC Deposit No:Z, the amino acid sequence of the polypeptide encoded by the nucleotide sequence in SEQ ID NO:X as defined in columns 8 and 9 of Table 2, the amino acid sequence of the polypeptide encoded by the nucleotide sequence in SEQ ID NO:B as defined in column 6 of Table 1C, the amino acid sequence as defined in columns 6 and 7 of Table 1B.1, an amino acid sequence encoded by the nucleotide sequence in SEQ ID NO:X, and an amino acid sequence encoded by the complement of the polynucleotide sequence in SEQ ID NO:X. Fragments of these polypeptides are also provided (e.g., those fragments described herein). Further proteins encoded by polynucleotides which hybridize to the complement of the nucleic acid molecules encoding these amino acid sequences under stringent hybridization conditions or alternatively, under lower stringency conditions, are also encompassed by the invention, as are the polynucleotides encoding these proteins.

[0194] By a nucleic acid having a nucleotide sequence at least, for example, 95% “identical” to a reference nucleotide sequence of the present invention, it is intended that the nucleotide sequence of the nucleic acid is identical to the reference sequence except that the nucleotide sequence may include up to five point mutations per each 100 nucleotides of the reference nucleotide sequence encoding the polypeptide. In other words, to obtain a nucleic acid having a nucleotide sequence at least 95% identical to a reference nucleotide sequence, up to 5% of the nucleotides in the reference sequence may be deleted or substituted with another nucleotide, or a number of nucleotides up to 5% of the total nucleotides in the reference sequence may be inserted into the reference sequence. The query sequence may be an entire sequence referred to in Table 1B or 2 as the ORF (open reading frame), or any fragment specified as described herein.

[0195] As a practical matter, whether any particular nucleic acid molecule or polypeptide is at least 80%, 85%, 90%, 95%, 96%, 97%, 98% or 99% identical to a nucleotide sequence of the present invention can be determined conventionally using known computer programs. A preferred method for determining the best overall match between a query sequence (a sequence of the present invention) and a subject sequence, also referred to as a global sequence alignment, can be determined using the FASTDB computer program based on the algorithm of Brutlag et al. (Comp. App. Biosci. 6:237-245 (1990)). In a sequence alignment the query and subject sequences are both DNA sequences. An RNA sequence can be compared by converting U's to T's. The result of said global sequence alignment is expressed as percent identity. Preferred parameters used in a FASTDB alignment of DNA sequences to calculate percent identity are: Matrix=Unitary, k-tuple=4, Mismatch Penalty=1, Joining Penalty=30, Randomization Group Length=0, Cutoff Score=1, Gap Penalty=5, Gap Size Penalty 0.05, Window Size=500 or the length of the subject nucleotide sequence, whichever is shorter.

[0196] If the subject sequence is shorter than the query sequence because of 5′ or 3′ deletions, not because of internal deletions, a manual correction must be made to the results. This is because the FASTDB program does not account for 5′ and 3′ truncations of the subject sequence when calculating percent identity. For subject sequences truncated at the 5′ or 3′ ends, relative to the query sequence, the percent identity is corrected by calculating the number of bases of the query sequence that are 5′ and 3′ of the subject sequence, which are not matched/aligned, as a percent of the total bases of the query sequence. Whether a nucleotide is matched/aligned is determined by results of the FASTDB sequence alignment. This percentage is then subtracted from the percent identity, calculated by the above FASTDB program using the specified parameters, to arrive at a final percent identity score. This corrected score is what is used for the purposes of the present invention. Only bases outside the 5′ and 3′ bases of the subject sequence, as displayed by the FASTDB alignment, which are not matched/aligned with the query sequence, are calculated for the purposes of manually adjusting the percent identity score.

[0197] For example, a 90 base subject sequence is aligned to a 100 base query sequence to determine percent identity. The deletions occur at the 5′ end of the subject sequence and therefore, the FASTDB alignment does not show a matched/alignment of the first 10 bases at 5′ end. The 10 unpaired bases represent 10% of the sequence (number of bases at the 5′ and 3′ ends not matched/total number of bases in the query sequence) so 10% is subtracted from the percent identity score calculated by the FASTDB program If the remaining 90 bases were perfectly matched the final percent identity would be 90%. In another example, a 90 base subject sequence is compared with a 100 base query sequence. This time the deletions are internal deletions so that there are no bases on the 5′ or 3′ of the subject sequence which are not matched/aligned with the query. In this case the percent identity calculated by FASTDB is not manually corrected. Once again, only bases 5′ and 3′ of the subject sequence which are not matched/aligned with the query sequence are manually corrected for. No other manual corrections are to be made for the purposes of the present invention.

[0198] By a polypeptide having an amino acid sequence at least, for example, 95% “identical” to a query amino acid sequence of the present invention, it is intended that the amino acid sequence of the subject polypeptide is identical to the query sequence except that the subject polypeptide sequence may include up to five amino acid alterations per each 100 amino acids of the query amino acid sequence. In other words, to obtain a polypeptide having an amino acid sequence at least 95% identical to a query amino acid sequence, up to 5% of the amino acid residues in the subject sequence may be inserted, deleted, (indels) or substituted with another amino acid. These alterations of the reference sequence may occur at the amino or carboxy terminal positions of the reference amino acid sequence or anywhere between those terminal positions, interspersed either individually among residues in the reference sequence or in one or more contiguous groups within the reference sequence.

[0199] As a practical matter, whether any particular polypeptide is at least 80%, 85%, 90%, 95%, 96%, 97%, 98% or 99% identical to, for instance, the amino acid sequence of a polypeptide referred to in Table 1A (e.g., the amino acid sequence delineated in columns 14 and 15) or a fragment thereof, Table 1B.1 (e.g., the amino acid sequence identified in column 6) or a fragment thereof, Table 2 (e.g., the amino acid sequence of the polypeptide encoded by the polynucleotide sequence defined in columns 8 and 9 of Table 2) or a fragment thereof, the amino acid sequence of the polypeptide encoded by the polynucleotide sequence in SEQ ID NO:B as defined in column 6 of Table 1C or a fragment thereof, the amino acid sequence of the polypeptide encoded by the nucleotide sequence in SEQ ID NO:X or a fragment thereof, or the amino acid sequence of the polypeptide encoded by cDNA contained in ATCC Deposit No:Z, or a fragment thereof, the amino acid sequence of a mature (secreted) polypeptide encoded by cDNA contained in ATCC Deposit No:Z, or a fragment thereof, can be determined conventionally using known computer programs. A preferred method for determining the best overall match between a query sequence (a sequence of the present invention) and a subject sequence, also referred to as a global sequence alignment, can be determined using the FASTDB computer program based on the algorithm of Brutlag et al. (Comp. App. Biosci.6:237-245 (1990)). In a sequence alignment the query and subject sequences are either both nucleotide sequences or both amino acid sequences. The result of said global sequence alignment is expressed as percent identity. Preferred parameters used in a FASTDB amino acid alignment are: Matrix=PAM 0, k-tuple=2, Mismatch Penalty=1, Joining Penalty=20, Randomization Group Length=0, Cutoff Score=1, Window Size=sequence length, Gap Penalty=5, Gap Size Penalty=0.05, Window Size=500 or the length of the subject amino acid sequence, whichever is shorter.

[0200] If the subject sequence is shorter than the query sequence due to N— or C-terminal deletions, not because of internal deletions, a manual correction must be made to the results. This is because the FASTDB program does not account for N— and C-terminal truncations of the subject sequence when calculating global percent identity. For subject sequences truncated at the N— and C-termini, relative to the query sequence, the percent identity is corrected by calculating the number of residues of the query sequence that are N— and C-terminal of the subject sequence, which are not matched/aligned with a corresponding subject residue, as a percent of the total bases of the query sequence. Whether a residue is matched/aligned is determined by results of the FASTDB sequence alignment. This percentage is then subtracted from the percent identity, calculated by the above FASTDB program using the specified parameters, to arrive at a final percent identity score. This final percent identity score is what is used for the purposes of the present invention. Only residues to the N— and C-termini of the subject sequence, which are not matched/aligned with the query sequence, are considered for the purposes of manually adjusting the percent identity score. That is, only query residue positions outside the farthest N— and C-terminal residues of the subject sequence.

[0201] For example, a 90 amino acid residue subject sequence is aligned with a 100 residue query sequence to determine percent identity. The deletion occurs at the N-terminus of the subject sequence and therefore, the FASTDB alignment does not show a matching/alignment of the first 10 residues at the N-terminus. The 10 unpaired residues represent 10% of the sequence (number of residues at the N— and C-termini not matched/total number of residues in the query sequence) so 10% is subtracted from the percent identity score calculated by the FASTDB program. If the remaining 90 residues were perfectly matched the final percent identity would be 90%. In another example, a 90 residue subject sequence is compared with a 100 residue query sequence. This time the deletions are internal deletions so there are no residues at the N— or C-termini of the subject sequence which are not matched/aligned with the query. In this case the percent identity calculated by FASTDB is not manually corrected. Once again, only residue positions outside the N— and C-terminal ends of the subject sequence, as displayed in the FASTDB alignment, which are not matched/aligned with the query sequnce are manually corrected for. No other manual corrections are to made for the purposes of the present invention.

[0202] The polynucleotide variants of the invention may contain alterations in the coding regions, non-coding regions, or both. Especially preferred are polynucleotide variants containing alterations which produce silent substitutions, additions, or deletions, but do not alter the properties or activities of the encoded polypeptide. Nucleotide variants produced by silent substitutions due to the degeneracy of the genetic code are preferred. Moreover, polypeptide variants in which less than 50, less than 40, less than 30, less than 20, less than 10, or 5-50, 5-25, 5-10, 1-5, or 1-2 amino acids are substituted, deleted, or added in any combination are also preferred. Polynucleotide variants can be produced for a variety of reasons, e.g., to optimize codon expression for a particular host (change codons in the human mRNA to those preferred by a bacterial host such as E. coli).

[0203] Naturally occurring variants are called “allelic variants,” and refer to one of several alternate forms of a gene occupying a given locus on a chromosome of an organism (Genes II, Lewin, B., ed., John Wiley & Sons, New York (1985)). These allelic variants can vary at either the polynucleotide and/or polypeptide level and are included in the present invention. Alternatively, non-naturally occurring variants may be produced by mutagenesis techniques or by direct synthesis.

[0204] Using known methods of protein engineering and recombinant DNA technology, variants may be generated to improve or alter the characteristics of the polypeptides of the present invention. For instance, one or more amino acids can be deleted from the N-terminus or C-terminus of the polypeptide of the present invention without substantial loss of biological function. As an example, Ron et al. (J. Biol. Chem. 268: 2984-2988 (1993)) reported variant KGF proteins having heparin binding activity even after deleting 3, 8, or 27 amino-terminal amino acid residues. Similarly, Interferon gamma exhibited up to ten times higher activity after deleting 8-10 amino acid residues from the carboxy terminus of this protein. (Dobeli et al., J. Biotechnology 7:199-216 (1988).)

[0205] Moreover, ample evidence demonstrates that variants often retain a biological activity similar to that of the naturally occurring protein. For example, Gayle and coworkers (J. Biol. Chem. 268:22105-22111 (1993)) conducted extensive mutational analysis of human cytokine IL-1a. They used random mutagenesis to generate over 3,500 individual IL-1a mutants that averaged 2.5 amino acid changes per variant over the entire length of the molecule. Multiple mutations were examined at every possible amino acid position. The investigators found that “[m]ost of the molecule could be altered with little effect on either [binding or biological activity].” In fact, only 23 unique amino acid sequences, out of more than 3,500 nucleotide sequences examined, produced a protein that significantly differed in activity from wild-type.

[0206] Furthermore, even if deleting one or more amino acids from the N-terminus or C-terminus of a polypeptide results in modification or loss of one or more biological functions, other biological activities may still be retained. For example, the ability of a deletion variant to induce and/or to bind antibodies which recognize the secreted form will likely be retained when less than the majority of the residues of the secreted form are removed from the N-terminus or C-terminus. Whether a particular polypeptide lacking N— or C-terminal residues of a protein retains such immunogenic activities can readily be determined by routine methods described herein and otherwise known in the art.

[0207] Thus, the invention further includes polypeptide variants which show a biological or functional activity of the polypeptides of the invention (such as, for example, activity useful in detecting, preventing, diagnosing, prognosticating, treating, and/or ameliorating cardiovascular disorders). Such variants include deletions, insertions, inversions, repeats, and substitutions selected according to general rules known in the art so as have little effect on activity.

[0208] The present application is directed to nucleic acid molecules at least 80%, 85%, 90%, 95%, 96%, 97%, 98%, 99% or 100% identical to the nucleic acid sequences disclosed herein, (e.g., encoding a polypeptide having the amino acid sequence of an N and/or C terminal deletion), irrespective of whether they encode a polypeptide having functional activity. This is because even where a particular nucleic acid molecule does not encode a polypeptide having functional activity, one of skill in the art would still know how to use the nucleic acid molecule, for instance, as a hybridization probe or a polymerase chain reaction (PCR) primer. Uses of the nucleic acid molecules of the present invention that do not encode a polypeptide having functional activity include, inter alia, (1) isolating a gene or allelic or splice variants thereof in a cDNA library; (2) in situ hybridization (e.g., “FISH”) to metaphase chromosomal spreads to provide precise chromosomal location of the gene, as described in Verma et al., Human Chromosomes: A Manual of Basic Techniques, Pergamon Press, New York (1988); (3) Northern Blot analysis for detecting mRNA expression in specific tissues (e.g., normal or diseased tissues); and (4) in situ hybridization (e.g., histochemistry) for detecting mRNA expression in specific tissues (e.g., normal or diseased tissues).

[0209] Preferred, however, are nucleic acid molecules having sequences at least 80%, 85%, 90%, 95%, 96%, 97%, 98%, 99% or 100% identical to the nucleic acid sequences disclosed herein, which do, in fact, encode a polypeptide having functional activity. By a polypeptide having “functional activity” is meant, a polypeptide capable of displaying one or more known functional activities associated with a full-length (complete) protein and/or a mature (secreted) protein of the invention. Such functional activities include, but are not limited to, biological activity (such as, for example, activity useful in detecting, preventing, diagnosing, prognosticating, treating, and/or ameliorating gastrointestinal diseases and disorders), antigenicity (ability to bind, or compete with a polypeptide of the invention for binding, to an anti-polypeptide of the invention antibody), immunogenicity (ability to generate antibody which binds to a specific polypeptide of the invention), ability to form multimers with polypeptides of the invention, and ability to bind to a receptor or ligand for a polypeptide of the invention.

[0210] The functional activity of the polypeptides, and fragments, variants and derivatives of the invention, can be assayed by various methods.

[0211] For example, in one embodiment where one is assaying for the ability to bind or compete with a full-length polypeptide of the present invention for binding to an anti-polypetide antibody, various immunoassays known in the art can be used, including but not limited to, competitive and non-competitive assay systems using techniques such as radioimmunoassays, ELISA (enzyme linked immunosorbent assay), “sandwich” immunoassays, immunoradiometric assays, gel diffusion precipitation reactions, immunodiffusion assays, in situ immunoassays (using colloidal gold, enzyme or radioisotope labels, for example), western blots, precipitation reactions, agglutination assays (e.g., gel agglutination assays, hemagglutination assays), complement fixation assays, immunofluorescence assays, protein A assays, and immunoelectrophoresis assays, etc. In one embodiment, antibody binding is detected by detecting a label on the primary antibody. In another embodiment, the primary antibody is detected by detecting binding of a secondary antibody or reagent to the primary antibody. In a further embodiment, the secondary antibody is labeled. Many means are known in the art for detecting binding in an immunoassay and are within the scope of the present invention.

[0212] In another embodiment, where a ligand is identified, or the ability of a polypeptide fragment, variant or derivative of the invention to multimerize is being evaluated, binding can be assayed, e.g., by means well-known in the art, such as, for example, reducing and non-reducing gel chromatography, protein affinity chromatography, and affinity blotting. See generally, Phizicky et al., Microbiol. Rev. 59:94-123 (1995). In another embodiment, the ability of physiological correlates of a polypeptide of the present invention to bind to a substrate(s) of the polypeptide of the invention can be routinely assayed using techniques known in the art.

[0213] In addition, assays described herein (see Examples) and otherwise known in the art may routinely be applied to measure the ability of polypeptides of the present invention and fragments, variants and derivatives thereof to elicit polypeptide related biological activity (either in vitro or in vivo). Other methods will be known to the skilled artisan and are within the scope of the invention.

[0214] Of course, due to the degeneracy of the genetic code, one of ordinary skill in the art will immediately recognize that a large number of the nucleic acid molecules having a sequence at least 80%, 85%, 90%, 95%, 96%, 97%, 98%, 99%, or 100% identical to, for example, the nucleic acid sequence of the cDNA contained in ATCC Deposit No:Z, the nucleic acid sequence referred to in Table 1B (SEQ ID NO:X), the nucleic acid sequence disclosed in Table 1A (e.g., the nucleic acid sequence delineated in columns 7 and 8), the nucleic acid sequence disclosed in Table 2 (e.g., the nucleic acid sequence delineated in columns 8 and 9) or fragments thereof, will encode polypeptides “having functional activity.” In fact, since degenerate variants of any of these nucleotide sequences all encode the same polypeptide, in many instances, this will be clear to the skilled artisan even without performing the above described comparison assay. It will be further recognized in the art that, for such nucleic acid molecules that are not degenerate variants, a reasonable number will also encode a polypeptide having functional activity. This is because the skilled artisan is fully aware of amino acid substitutions that are either less likely or not likely to significantly effect protein function (e.g., replacing one aliphatic amino acid with a second aliphatic amino acid), as further described below.

[0215] For example, guidance concerning how to make phenotypically silent amino acid substitutions is provided in Bowie et al., “Deciphering the Message in Protein Sequences: Tolerance to Amino Acid Substitutions,” Science 247:1306-1310 (1990), wherein the authors indicate that there are two main strategies for studying the tolerance of an amino acid sequence to change.

[0216] The first strategy exploits the tolerance of amino acid substitutions by natural selection during the process of evolution. By comparing amino acid sequences in different species, conserved amino acids can be identified. These conserved amino acids are likely important for protein function. In contrast, the amino acid positions where substitutions have been tolerated by natural selection indicates that these positions are not critical for protein function. Thus, positions tolerating amino acid substitution could be modified while still maintaining biological activity of the protein.

[0217] The second strategy uses genetic engineering to introduce amino acid changes at specific positions of a cloned gene to identify regions critical for protein function. For example, site directed mutagenesis or alanine-scanning mutagenesis (introduction of single alanine mutations at every residue in the molecule) can be used. See Cunningham and Wells, Science 244:1081-1085 (1989). The resulting mutant molecules can then be tested for biological activity.

[0218] As the authors state, these two strategies have revealed that proteins are surprisingly tolerant of amino acid substitutions. The authors further indicate which amino acid changes are likely to be permissive at certain amino acid positions in the protein. For example, most buried (within the tertiary structure of the protein) amino acid residues require nonpolar side chains, whereas few features of surface side chains are generally conserved. Moreover, tolerated conservative amino acid substitutions involve replacement of the aliphatic or hydrophobic amino acids Ala, Val, Leu and Ile; replacement of the hydroxyl residues Ser and Thr; replacement of the acidic residues Asp and Glu; replacement of the amide residues Asn and Gln, replacement of the basic residues Lys, Arg, and His; replacement of the aromatic residues Phe, Tyr, and Trp, and replacement of the small-sized amino acids Ala, Ser, Thr, Met, and Gly.

[0219] Besides conservative amino acid substitution, variants of the present invention include (i) substitutions with one or more of the non-conserved amino acid residues, where the substituted amino acid residues may or may not be one encoded by the genetic code, or (ii) substitutions with one or more of the amino acid residues having a substituent group, or (iii) fusion of the mature polypeptide with another compound, such as a compound to increase the stability and/or solubility of the polypeptide (for example, polyethylene glycol), (iv) fusion of the polypeptide with additional amino acids, such as, for example, an IgG Fc fusion region peptide, serum albumin (preferably human serum albumin) or a fragment thereof, or leader or secretory sequence, or a sequence facilitating purification, or (v) fusion of the polypeptide with another compound, such as albumin (including but not limited to recombinant albumin (see, e.g., U.S. Pat. No. 5,876,969, issued Mar. 2, 1999, EP Patent 0 413 622, and U.S. Pat. No. 5,766,883, issued Jun. 16, 1998, herein incorporated by reference in their entirety)). Such variant polypeptides are deemed to be within the scope of those skilled in the art from the teachings herein.

[0220] For example, polypeptide variants containing amino acid substitutions of charged amino acids with other charged or neutral amino acids may produce proteins with improved characteristics, such as less aggregation. Aggregation of pharmaceutical formulations both reduces activity and increases clearance due to the aggregate's immunogenic activity. See Pinckard et al., Clin. Exp. Immunol. 2:331-340 (1967); Robbins et al., Diabetes 36: 838-845 (1987); Cleland et al., Crit. Rev. Therapeutic Drug Carrier Systems 10:307-377 (1993).

[0221] A further embodiment of the invention relates to polypeptides which comprise the amino acid sequence of a polypeptide having an amino acid sequence which contains at least one amino acid substitution, but not more than 50 amino acid substitutions, even more preferably, not more than 40 amino acid substitutions, still more preferably, not more than 30 amino acid substitutions, and still even more preferably, not more than 20 amino acid substitutions from a polypeptide sequence disclosed herein. Of course it is highly preferable for a polypeptide to have an amino acid sequence which, for example, comprises the amino acid sequence of a polypeptide of SEQ ID NO:Y, the amino acid sequence of the mature (e.g., secreted) polypeptide of SEQ ID NO:Y, an amino acid sequence encoded by SEQ ID NO:X, an amino acid sequence encoded by the portion of SEQ ID NO:X as defined in columns 8 and 9 of Table 2, an amino acid sequence encoded by the complement of SEQ ID NO:X, an amino acid sequence encoded by cDNA contained in ATCC Deposit No:Z, and/or the amino acid sequence of a mature (secreted) polypeptide encoded by cDNA contained in ATCC Deposit No:Z, or a fragment thereof, which contains, in order of ever-increasing preference, at least one, but not more than 10, 9, 8, 7, 6, 5, 4, 3, 2 or 1 amino acid substitutions.

[0222] In specific embodiments, the polypeptides of the invention comprise, or alternatively, consist of, fragments or variants of a reference amino acid sequence selected from: (a) the amino acid sequence of SEQ ID NO:Y or fragments thereof (e.g., the mature formand/or other fragments described herein); (b) the amino acid sequence encoded by SEQ ID NO:X or fragments thereof; (c) the amino acid sequence encoded by the complement of SEQ ID NO:X or fragments thereof; (d) the amino acid sequence encoded by the portion of SEQ I) NO:X as defined in columns 8 and 9 of Table 2 or fragments thereof; and (e) the amino acid sequence encoded by cDNA contained in ATCC Deposit No:Z or fragments thereof; wherein the fragments or variants have 1-5, 5-10, 5-25, 5-50, 10-50 or 50-150, amino acid residue additions, substitutions, and/or deletions when compared to the reference amino acid sequence. In preferred embodiments, the amino acid substitutions are conservative. Polynucleotides encoding these polypeptides are also encompassed by the invention.

[0223] Polynucleotide and Polypeptide Fragments

[0224] The present invention is also directed to polynucleotide fragments of the polynucleotides (nucleic acids) of the invention. In the present invention, a “polynucleotide fragment” refers to a polynucleotide having a nucleic acid sequence which, for example: is a portion of the cDNA contained in ATCC Deposit No:Z or the complementary strand thereto; is a portion of the polynucleotide sequence encoding the polypeptide encoded by the cDNA contained in ATCC Deposit No:Z or the complementary strand thereto; is a portion of the polynucleotide sequence encoding the mature (secreted) polypeptide encoded by the cDNA contained in ATCC Deposit No:Z or the complementary strand thereto; is a portion of a polynucleotide sequence encoding the mature amino acid sequence as defined in columns 14 and 15 of Table 1A or the complementary strand thereto; is a portion of a polynucleotide sequence encoding the amino acid sequence encoded by the region of SEQ ID NO:X as defined in columns 8 and 9 of Table 2 or the complementary strand thereto; is a portion of the polynucleotide sequence of SEQ ID NO:X as defined in columns 8 and 9 of Table 2 or the complementary strand thereto; is a portion of the polynucleotide sequence in SEQ ID NO:X or the complementary strand thereto; is a polynucleotide sequence encoding a portion of the polypeptide of SEQ ID NO:Y; is a polynucleotide sequence encoding a portion of a polypeptide encoded by SEQ ID NO:X; is a polynucleotide sequence encoding a portion of a polypeptide encoded by the complement of the polynucleotide sequence in SEQ ID NO:X; is a portion of a polynucleotide sequence encoding the amino acid sequence encoded by the region of SEQ ID NO:B as defined in column 6 of Table 1C or the complementary strand thereto; or is a portion of the polynucleotide sequence of SEQ ID NO:B as defined in column 6 of Table 1C or the complementary strand thereto.

[0225] The polynucleotide fragments of the invention are preferably at least about 15 nt, and more preferably at least about 20 nt, still more preferably at least about 30 nt, and even more preferably, at least about 40 nt, at least about 50 nt, at least about 75 nt, or at least about 150 nt in length. A fragment “at least 20 nt in length,” for example, is intended to include 20 or more contiguous bases from the cDNA sequence contained in ATCC Deposit No:Z, or the nucleotide sequence shown in SEQ ID NO:X or the complementary stand thereto. In this context “about” includes the particularly recited value or a value larger or smaller by several (5, 4, 3, 2, or 1) nucleotides, at either terminus or at both termini. These nucleotide fragments have uses that include, but are not limited to, as diagnostic probes and primers as discussed herein. Of course, larger fragments (e.g., at least 160, 170, 180, 190, 200, 250, 500, 600, 1000, or 2000 nucleotides in length ) are also encompassed by the invention.

[0226] Moreover, representative examples of polynucleotide fragments of the invention comprise, or alternatively consist of, a sequence from about nucleotide number 1-50, 51-100, 101-150, 151-200, 201-250, 251-300, 301-350, 351-400, 401-450, 451-500, 501-550, 551-600, 601-650, 651-700, 701-750, 751-800, 801-850, 851-900, 901-950, 951-1000, 1001-1050, 1051-1100, 1101-1150, 1151-1200, 1201-1250, 1251-1300, 1301-1350, 1351-1400, 1401-1450, 1451-1500, 1501-1550, 1551-1600, 1601-1650, 1651-1700, 1701-1750, 1751-1800, 1801-1850, 1851-1900, 1901-1950, 1951-2000, 2001-2050, 2051-2100, 2101-2150, 2151-2200, 2201-2250, 2251-2300, 2301-2350, 2351-2400, 2401-2450, 2451-2500, 2501-2550, 2551-2600, 2601-2650, 2651-2700, 2701-2750, 2751-2800, 2801-2850, 2851-2900, 2901-2950, 2951-3000, 3001-3050, 3051-3100, 3101-3150, 3151-3200, 3201-3250, 3251-3300, 3301-3350, 3351-3400, 3401-3450, 3451-3500, 3501-3550, 3551-3600, 3601-3650, 3651-3700, 3701-3750, 3751-3800, 3801-3850, 3851-3900, 3901-3950, 3951-4000, 4001-4050, 4051-4100, 4101-4150, 4151-4200, 4201-4250, 42514300, 4301-4350, 4351-4400, 4401-4450, 4451-4500, 4501-4550, 4551-4600, 4601-4650, 4651-4700, 4701-4750, 4751-4800, 4801-4850, 4851-4900, 4901-4950, 4951-5000, 5001-5050, 5051-5100, 5101-5150, 5151-5200, 5201-5250, 5251-5300, 5301-5350, 5351-5400, 5401-5450, 5451-5500, 5501-5550, 5551-5600, 5601-5650, 5651-5700, 5701-5750, 5751-5800, 5801-5850, 5851-5900, 5901-5950, 5951-6000, 6001-6050, 6051-6100, 6101-6150, 6151-6200, 6201-6250, 6251-6300, 6301-6350, 6351-6400, 6401-6450, 6451-6500, 6501-6550, 6551-6600, 6601-6650, 6651-6700, 6701-6750, 6751-6800, 6801-6850, 6851-6900, 6901-6950, 6951-7000, 7001-7050, 7051-7100, 7101-7150, 7151-7200, 7201-7250, 7251-7300 or 7301 to the end of SEQ ID NO:X, or the complementary strand thereto. In this context “about” includes the particularly recited range or a range larger or smaller by several (5, 4, 3, 2, or 1) nucleotides, at either terminus or at both termini. Preferably, these fragments encode a polypeptide which has a functional activity (e.g., biological activity; such as, for example, activity useful in detecting, preventing, diagnosing, prognosticating, treating, and/or ameliorating gastrointestinal diseases and disorders). More preferably, these polynucleotides can be used as probes or primers as discussed herein. Polynucleotides which hybridize to one or more of these polynucleotides under stringent hybridization conditions or alternatively, under lower stringency conditions are also encompassed by the invention, as are polypeptides encoded by these polynucleotides.

[0227] Further representative examples of polynucleotide fragments of the invention comprise, or alternatively consist of, a sequence from about nucleotide number 1-50, 51-100, 101-150, 151-200, 201-250, 251-300, 301-350, 351-400, 401-450, 451-500, 501-550, 551-600, 601-650, 651-700, 701-750, 751-800, 801-850, 851-900, 901-950, 951-1000, 1001-1050, 1051-1100, 1101-1150, 1151-1200, 1201-1250, 1251-1300, 1301-1350, 1351-1400, 1401-1450, 1451-1500, 1501-1550, 1551-1600, 1601-1650, 1651-1700, 1701-1750, 1751-1800, 1801-1850, 1851-1900, 1901-1950, 1951-2000, 2001-2050, 2051-2100, 2101-2150, 2151-2200, 2201-2250, 2251-2300, 2301-2350, 2351-2400, 2401-2450, 2451-2500, 2501-2550, 2551-2600, 2601-2650, 2651-2700, 2701-2750, 2751-2800, 2801-2850, 2851-2900, 2901-2950, 2951-3000, 3001-3050, 3051-3100, 3101-3150, 3151-3200, 3201-3250, 3251-3300, 3301-3350, 3351-3400, 3401-3450, 3451-3500, 3501-3550, 3551-3600, 3601-3650, 3651-3700, 3701-3750, 3751-3800, 3801-3850, 3851-3900, 3901-3950, 3951-4000, 4001-4050, 4051-4100, 4101-4150, 4151-4200, 42014250, 4251-4300, 4301-4350, 4351-4400, 4401-4450, 4451-4500, 4501-4550, 4551-4600, 4601-4650, 4651-4700, 4701-4750, 4751-4800, 4801-4850, 4851-4900, 4901-4950, 4951-5000, 5001-5050, 5051-5100, 5101-5150, 5151-5200, 5201-5250, 5251-5300, 5301-5350, 5351-5400, 5401-5450, 5451-5500, 5501-5550, 5551-5600, 5601-5650, 5651-5700, 5701-5750, 5751-5800, 5801-5850, 5851-5900, 5901-5950, 5951-6000, 6001-6050, 6051-6100, 6101-6150, 6151-6200, 6201-6250, 6251-6300, 6301-6350, 6351-6400, 6401-6450, 6451-6500, 6501-6550, 6551-6600, 6601-6650, 6651-6700, 6701-6750, 6751-6800, 6801-6850, 6851-6900, 6901-6950, 6951-7000, 7001-7050, 7051-7100, 7101-7150, 7151-7200, 7201-7250, 7251-7300 or 7301 to the end of the cDNA sequence contained in ATCC Deposit No:Z, or the complementary strand thereto. In this context “about” includes the particularly recited range or a range larger or smaller by several (5, 4, 3, 2, or 1) nucleotides, at either terminus or at both termini. Preferably, these fragments encode a polypeptide which has a functional activity (e.g., biological activity). More preferably, these polynucleotides can be used as probes or primers as discussed herein. Polynucleotides which hybridize to one or more of these polynucleotides under stringent hybridization conditions or alternatively, under lower stringency conditions are also encompassed by the invention, as are polypeptides encoded by these polynucleotides.

[0228] Moreover, representative examples of polynucleotide fragments of the invention comprise, or alternatively consist of, a nucleic acid sequence comprising one, two, three, four, five, six, seven, eight, nine, ten, or more of the above described polynucleotide fragments of the invention in combination with a polynucleotide sequence delineated in Table 1C column 6. Additional, representative examples of polynucleotide fragments of the invention comprise, or alternatively consist of, a nucleic acid sequence comprising one, two, three, four, five, six, seven, eight, nine, ten, or more of the above described polynucleotide fragments of the invention in combination with a polynucleotide sequence that is the complementary strand of a sequence delineated in column 6 of Table 1C. In further embodiments, the above-described polynucleotide fragments of the invention comprise, or alternatively consist of, sequences delineated in Table 1C, column 6, and have a nucleic acid sequence which is different from that of the BAC fragment having the sequence disclosed in SEQ ID NO:B (see Table 1C, column 5). In additional embodiments, the above-described polynucleotide fragments of the invention comprise, or alternatively consist of, sequences delineated in Table 1C, column 6, and have a nucleic acid sequence which is different from that published for the BAC clone identified as BAC ID NO:A (see Table 1C, column 4). In additional embodiments, the above-described polynucleotides of the invention comprise, or alternatively consist of, sequences delineated Table 1C, column 6, and have a nucleic acid sequence which is different from that contained in the BAC clone identified as BAC ID NO:A (see Table 1C, column 4). Polypeptides encoded by these polynucleotides, other polynucleotides that encode these polypeptides, and antibodies that bind these polypeptides are also encompassed by the invention. Additionally, fragments and variants of the above-described polynucleotides and polypeptides are also encompassed by the invention.

[0229] In additional specific embodiments, polynucleotides of the invention comprise, or alternatively consist of, one, two, three, four, five, six, seven, eight, nine, ten, or more fragments of the sequences delineated in column 6 of Table 1C, and the polynucleotide sequence of SEQ ID NO:X (e.g., as defined in Table 1C, column 2) or fragments or variants thereof. Polypeptides encoded by these polynucleotides, other polynucleotides that encode these polypeptides, and antibodies that bind these polypeptides are also encompassed by the invention.

[0230] In additional specific embodiments, polynucleotides of the invention comprise, or alternatively consist of, one, two, three, four, five, six, seven, eight, nine, ten, or more fragments of the sequences delineated in column 6 of Table 1C which correspond to the same ATCC Deposit No:Z (see Table 1C, column 1), and the polynucleotide sequence of SEQ ID NO:X (e.g., as defined in Table 1A, 1B, or 1C) or fragments or variants thereof. Polypeptides encoded by these polynucleotides, other polynucleotides that encode these polypeptides, and antibodies that bind these polypeptides are also encompassed by the invention.

[0231] In further specific embodiments, polynucleotides of the invention comprise, or alternatively consist of, one, two, three, four, five, six, seven, eight, nine, ten, or more fragments of the sequences delineated in the same row of column 6 of Table 1C, and the polynucleotide sequence of SEQ ID NO:X (e.g., as defined in Table 1A, 1B, or 1C) or fragments or variants thereof. Polypeptides encoded by these polynucleotides, other polynucleotides that encode these polypeptides, and antibodies that bind these polypeptides are also encompassed by the invention.

[0232] In additional specific embodiments, polynucleotides of the invention comprise, or alternatively consist of a polynucleotide sequence in which the 3′ 10 polynucleotides of one of the sequences delineated in column 6 of Table 1C and the 5′ 10 polynucleotides of the sequence of SEQ ID NO:X are directly contiguous. Nucleic acids which hybridize to the complement of these contiguous polynucleotides under stringent hybridization conditions or alternatively, under lower stringency conditions, are also encompassed by the invention. Polypeptides encoded by these polynucleotides and/or nucleic acids, other polynucleotides and/or nucleic acids that encode these polypeptides, and antibodies that bind these polypeptides are also encompassed by the invention. Additionally, fragments and variants of the above-described polynucleotides, nucleic acids, and polypeptides are also encompassed by the invention.

[0233] In additional specific embodiments, polynucleotides of the invention comprise, or alternatively consist of a polynucleotide sequence in which the 3′ 10 polynucleotides of one of the sequences delineated in column 6 of Table 1C and the 5′ 10 polynucleotides of a fragment or variant of the sequence of SEQ ID NO:X (e.g., as described herein) are directly contiguous Nucleic acids which hybridize to the complement of these 20 contiguous polynucleotides under stringent hybridization conditions or alternatively, under lower stringency conditions, are also encompassed by the invention. Polypeptides encoded by these polynucleotides and/or nucleic acids, other polynucleotides and/or nucleic acids encoding these polypeptides, and antibodies that bind these polypeptides are also encompassed by the invention. Additionally, fragments and variants of the above-described polynucleotides, nucleic acids, and polypeptides are also encompassed by the invention.

[0234] In further specific embodiments, polynucleotides of the invention comprise, or alternatively consist of a polynucleotide sequence in which the 3′ 10 polynucleotides of a fragment or variant of the sequence of SEQ ID NO:X and the 5′ 10 polynucleotides of the sequence of one of the sequences delineated in column 6 of Table 1C are directly contiguous. Nucleic acids which hybridize to the complement of these 20 contiguous polynucleotides under stringent hybridization conditions or alternatively, under lower stringency conditions, are also encompassed by the invention. Polypeptides encoded by these polynucleotides and/or nucleic acids, other polynucleotides and/or nucleic acids encoding these polypeptides, and antibodies that bind these polypeptides are also encompassed by the invention. Additionally, fragments and variants of the above-described polynucleotides, nucleic acids, and polypeptides are also encompassed by the invention.

[0235] In specific embodiments, polynucleotides of the invention comprise, or alternatively consist of a polynucleotide sequence in which the 3′ 10 polynucleotides of one of the sequences delineated in column 6 of Table 1C and the 5′ 10 polynucleotides of another sequence in column 6 are directly contiguous. In preferred embodiments, the 3′ 10 polynucleotides of one of the sequences delineated in column 6 of Table 1C is directly contiguous with the 5′ 10 polynucleotides of the next sequential exon delineated in Table 1C, column 6. Nucleic acids which hybridize to the complement of these 20 contiguous polynucleotides under stringent hybridization conditions or alternatively, under lower stringency conditions, are also encompassed by the invention. Polypeptides encoded by these polynucleotides and/or nucleic acids, other polynucleotides and/or nucleic acids encoding these polypeptides, and antibodies that bind these polypeptides are also encompassed by the invention. Additionally, fragments and variants of the above-described polynucleotides, nucleic acids, and polypeptides are also encompassed by the invention.

[0236] In the present invention, a “polypeptide fragment” refers to an amino acid sequence which is a portion of the amino acid sequence contained in SEQ ID NO:Y, is a portion of the mature form of SEQ ID NO:Y as defined in columns 14 and 15 of Table 1A, a portion of an amino acid sequence encoded by the portion of SEQ ID NO:X as defined in columns 8 and 9 of Table 2, is a portion of an amino acid sequence encoded by the polynucleotide sequence of SEQ ID NO:X, is a portion of an amino acid sequence encoded by the complement of the polynucleotide sequence in SEQ ID NO:X, is a portion of the amino acid sequence of a mature (secreted) polypeptide encoded by the cDNA contained in ATCC Deposit No:Z, and/or is a portion of an amino acid sequence encoded by the cDNA contained in ATCC Deposit No:Z. Protein (polypeptide) fragments may be “free-standing,” or comprised within a larger polypeptide of which the fragment forms a part or region, most preferably as a single continuous region. Representative examples of polypeptide fragments of the invention, include, for example, fragments comprising, or alternatively consisting of, from about amino acid number 1-20, 21-40, 41-60, 61-80, 81-100, 101-120, 121-140, 141-160, 161-180, 181-200, 201-220, 221-240, 241-260, 261-280, 281-300, 301-320, 321-340, 341-360, 361-380, 381-400, 401-420, 421-440, 441-460, 461-480, 481-500, 501-520, 521-540, 541-560, 561-580, 581-600, 601-620, 621-640, 641-660, 661-680, 681-700, 701-720, 721-740, 741-760, 761-780, 781-800, 801-820, 821-840, 841-860, 861-880, 881-900, 901-920, 921-940, 941-960, 961-980, 981-1000, 1001-1020, 1021-1040, 1041-1060, 1061-1080, 1081-1100, 1101-1120, 1121-1140, 1141-1160, 1161-1180, 1181-1200, 1201-1220, 1221-1240, 1241-1260, 1261-1280, 1281-1300, 1301-1320, 1321-1340, 1341-1360, 1361-1380, 1381-1400, 1401-1420, 1421-1440, or 1441-1441 to the end of the coding region of cDNA and SEQ ID NO: Y. In a preferred embodiment, polypeptide fragments of the invention include, for example, fragments comprising, or alternatively consisting of, from about amino acid number 1-20, 21-40, 41-60, 61-80, 81-100, 101-120, 121-140, 141-160, 161-180, 181-200, 201-220, 221-240, 241-260, 261-280, 281-300, 301-320, 321-340, 341-360, 361-380, 381-400, 401-420, 421-440, 441-460, 461-480, 481-500, 501-520, 521-540, 541-560, 561-580, 581-600, 601-620, 621-640, 641-660, 661-680, 681-700, 701-720, 721-740, 741-760, 761-780, 781-800, 801-820, 821-840, 841-860, 861-880, 881-900, 901-920, 921-940, 941-960, 961-980, 981-1000, 1001-1020, 1021-1040, 1041-1060, 1061-1080, 1081-1100, 1101-1120, 1121-1140, 1141-1160, 1161-1180, 1181-1200, 1201-1220, 1221-1240, 1241-1260, 1261-1280, 1281-1300, 1301-1320, 1321-1340, 1341-1360, 1361-1380, 1381-1400, 1401-1420, 1421-1440, or 1441 to the end of the coding region of SEQ ID NO:Y. Moreover, polypeptide fragments of the invention may be at least about 10, 15, 20, 25, 30, 35, 40, 45, 50, 55, 60, 65, 70, 75, 80, 85, 90, 100, 110, 120, 130, 140, or 150 amino acids in length. In this context “about” includes the particularly recited ranges or values, or ranges or values larger or smaller by several (5, 4, 3, 2, or 1) amino acids, at either extreme or at both extremes. Polynucleotides encoding these polypeptide fragments are also encompassed by the invention.

[0237] Even if deletion of one or more amino acids from the N-terminus of a protein results in modification of loss of one or more biological functions of the protein, other functional activities (e.g., biological activities; such as, for example, activity useful in detecting, preventing, diagnosing, prognosticating, treating, and/or ameliorating gastrointestinal diseases and disorders; ability to multimerize; ability to bind a ligand; antigenic ability useful for production of polypeptide specific antibodies) may still be retained. For example, the ability of shortened muteins to induce and/or bind to antibodies which recognize the complete or mature forms of the polypeptides generally will be retained when less than the majority of the residues of the complete or mature polypeptide are removed from the N-terminus. Whether a particular polypeptide lacking N-terminal residues of a complete polypeptide retains such immunologic activities can readily be determined by routine methods described herein and otherwise known in the art. It is not unlikely that a mutein with a large number of deleted N-terminal amino acid residues may retain some biological or immunogenic activities. In fact, peptides composed of as few as six amino acid residues may often evoke an immune response.

[0238] Accordingly, polypeptide fragments include the secreted protein as well as the mature form. Further preferred polypeptide fragments include the secreted protein or the mature form having a continuous series of deleted residues from the amino or the carboxy terminus, or both. For example, any number of amino acids, ranging from 1-60, can be deleted from the amino terminus of either the secreted polypeptide or the mature form. Similarly, any number of amino acids, ranging from 1-30, can be deleted from the carboxy terminus of the secreted protein or mature form. Furthermore, any combination of the above amino and carboxy terminus deletions are preferred. Similarly, polynucleotides encoding these polypeptide fragments are also preferred.

[0239] The present invention further provides polypeptides having one or more residues deleted from the amino terminus of the amino acid sequence of a polypeptide disclosed herein (e.g., a polypeptide of SEQ ID NO:Y, a polypeptide as defined in columns 14 and 15 of Table 1A, a polypeptide encoded by the polynucleotide sequence contained in SEQ ID NO:X or the complement thereof, a polypeptide encoded by the portion of SEQ ID NO:X as defined in columns 8 and 9 of Table 2, a polypeptide encoded by the portion of SEQ ID NO:B as defined in column 6 of Table 1C, a polypeptide encoded by the cDNA contained in ATCC Deposit No:Z, and/or a mature polypeptide encoded by the cDNA contained in ATCC Deposit No:Z). In particular, N-terminal deletions may be described by the general formula m, where q is a whole integer representing the total number of amino acid residues in a polypeptide of the invention (e.g., the polypeptide disclosed in SEQ ID NO:Y, the mature (secreted) portion of SEQ ID NO:Y as defined in columns 14 and 15 of Table 1A, or the polypeptide encoded by the portion of SEQ ID NO:X as defined in columns 8 and 9 of Table 2), and m is defined as any integer ranging from 2 to q-6. Polynucleotides encoding these polypeptides are also encompassed by the invention.

[0240] The present invention further provides polypeptides having one or more residues from the carboxy terminus of the amino acid sequence of a polypeptide disclosed herein (e.g., a polypeptide of SEQ ID NO:Y, the mature (secreted) portion of SEQ ID NO:Y as defined in columns 14 and 15 of Table 1A, a polypeptide encoded by the polynucleotide sequence contained in SEQ ID NO:X, a polypeptide encoded by the portion of SEQ ID NO:X as defined in columns 8 and 9 of Table 2, a polypeptide encoded by the portion of SEQ ID NO:B as defined in column 6 of Table 1C, a polypeptide encoded by the cDNA contained in ATCC Deposit No:Z, and/or a mature polypeptide encoded by the cDNA contained in ATCC Deposit No:Z). In particular, C-terminal deletions may be described by the general formula 1-n, where n is any whole integer ranging from 6 to q-1, and where n corresponds to the position of amino acid residue in a polypeptide of the invention. Polynucleotides encoding these polypeptides are also encompassed by the invention.

[0241] In addition, any of the above described N— or C-terminal deletions can be combined to produce a N— and C-terminal deleted polypeptide. The invention also provides polypeptides having one or more amino acids deleted from both the amino and the carboxyl termini, which may be described generally as having residues m-n of a polypeptide encoded by SEQ ID NO:X (e.g., including, but not limited to, the preferred polypeptide disclosed as SEQ ID NO:Y, the mature (secreted) portion of SEQ ID NO:Y as defined in columns 14 and 15 of Table 1A, and the polypeptide encoded by the portion of SEQ ID NO:X as defined in columns 8 and 9 of Table 2), the cDNA contained in ATCC Deposit No:Z, and/or the complement thereof, where n and m are integers as described above. Polynucleotides encoding these polypeptides are also encompassed by the invention.

[0242] Also as mentioned above, even if deletion of one or more amino acids from the C-terminus of a protein results in modification of loss of one or more biological functions of the protein, other functional activities (e.g., biological activities such as, for example, activity useful in detecting, preventing, diagnosing, prognosticating, treating, and/or ameliorating gastrointestinal diseases and disorders; ability to multimerize; ability to bind a ligand; antigenic ability useful for production of polypeptide specific antibodies) may still be retained. For example the ability of the shortened mutein to induce and/or bind to antibodies which recognize the complete or mature forms of the polypeptide generally will be retained when less than the majority of the residues of the complete or mature polypeptide are removed from the C-terminus. Whether a particular polypeptide lacking C-terminal residues of a complete polypeptide retains such immunologic activities can readily be determined by routine methods described herein and otherwise known in the art. It is not unlikely that a mutein with a large number of deleted C-terminal amino acid residues may retain some biological or immunogenic activities. In fact, peptides composed of as few as six amino acid residues may often evoke an immune response.

[0243] The present application is also directed to proteins containing polypeptides at least 80%, 85%, 90%, 95%, 96%, 97%, 98% or 99% identical to a polypeptide sequence set forth herein. In preferred embodiments, the application is directed to proteins containing polypeptides at least 80%, 85%, 90%, 95%, 96%, 97%, 98% or 99% identical to polypeptides having the amino acid sequence of the specific N— and C-terminal deletions. Polynucleotides encoding these polypeptides are also encompassed by the invention.

[0244] Any polypeptide sequence encoded by, for example, the polynucleotide sequences set forth as SEQ ID NO:X or the complement thereof, (presented, for example, in Tables 1A and 2), the cDNA contained in ATCC Deposit No:Z, or the polynucleotide sequence as defined in column 6 of Table 1C, may be analyzed to determine certain preferred regions of the polypeptide. For example, the amino acid sequence of a polypeptide encoded by a polynucleotide sequence of SEQ ID NO:X (e.g., the polypeptide of SEQ ID NO:Y and the polypeptide encoded by the portion of SEQ ID NO:X as defined in columnns 8 and 9 of Table 2) or the cDNA contained in ATCC Deposit No:Z may be analyzed using the default parameters of the DNASTAR computer algorithm (DNASTAR, Inc., 1228 S. Park St., Madison, Wis. 53715 USA; http://www.dnastar.com/).

[0245] Polypeptide regions that may be routinely obtained using the DNASTAR computer algorithm include, but are not limited to, Garnier-Robson alpha-regions, beta-regions, turn-regions, and coil-regions; Chou-Fasman alpha-regions, beta-regions, and turn-regions; Kyte-Doolittle hydrophilic regions and hydrophobic regions; Eisenberg alpha- and beta-amphipathic regions; Karplus-Schulz flexible regions; Emini surface-forming regions; and Jameson-Wolf regions of high antigenic index. Among highly preferred polynucleotides of the invention in this regard are those that encode polypeptides comprising regions that combine several structural features, such as several (e.g., 1, 2, 3 or 4) of the features set out above.

[0246] Additionally, Kyte-Doolittle hydrophilic regions and hydrophobic regions, Emini surface-forming regions, and Jameson-Wolf regions of high antigenic index (i.e., containing four or more contiguous amino acids having an antigenic index of greater than or equal to 1.5, as identified using the default parameters of the Jameson-Wolf program) can routinely be used to determine polypeptide regions that exhibit a high degree of potential for antigenicity. Regions of high antigenicity are determined from data by DNASTAR analysis by choosing values which represent regions of the polypeptide which are likely to be exposed on the surface of the polypeptide in an environment in which antigen recognition may occur in the process of initiation of an immune response.

[0247] Preferred polypeptide fragments of the invention are fragments comprising, or alternatively, consisting of, an amino acid sequence that displays a functional activity (e.g. biological activity such as, for example, activity useful in detecting, preventing, diagnosing, prognosticating, treating, and/or ameliorating gastrointestinal diseases and disorders; ability to multimerize; ability to bind a ligand; antigenic ability useful for production of polypeptide specific antibodies) of the polypeptide sequence of which the amino acid sequence is a fragment. By a polypeptide displaying a “functional activity” is meant a polypeptide capable of one or more known functional activities associated with a full-length protein, such as, for example, biological activity, antigenicity, immunogenicity, and/or multimerization, as described herein.

[0248] Other preferred polypeptide fragments are biologically active fragments. Biologically active fragments are those exhibiting activity similar, but not necessarily identical, to an activity of the polypeptide of the present invention. The biological activity of the fragments may include an improved desired activity, or a decreased undesirable activity.

[0249] In preferred embodiments, polypeptides of the invention comprise, or alternatively consist of, one, two, three, four, five or more of the antigenic fragments of the polypeptide of SEQ ID NO:Y, or portions thereof. Polynucleotides encoding these polypeptides are also encompassed by the invention.

[0250] Epitopes and Antibodies

[0251] The present invention encompasses polypeptides comprising, or alternatively consisting of, an epitope of: the polypeptide sequence shown in SEQ ID NO:Y; a polypeptide sequence encoded by SEQ ID NO:X or the complementary strand thereto; the polypeptide sequence encoded by the portion of SEQ ID NO:X as defined in columns 8 and 9 of Table 2; the polypeptide sequence encoded by the portion of SEQ ID NO:B as defined in column 6 of Table 1C or the complement thereto; the polypeptide sequence encoded by the cDNA contained in ATCC Deposit No:Z; or the polypeptide sequence encoded by a polynucleotide that hybridizes to the sequence of SEQ ID NO:X, the complement of the sequence of SEQ ID NO:X, the complement of a portion of SEQ ID NO:X as defined in columns 8 and 9 of Table 2, or the cDNA sequence contained in ATCC Deposit No:Z under stringent hybridization conditions or alternatively, under lower stringency hybridization as defined supra. The present invention further encompasses polynucleotide sequences encoding an epitope of a polypeptide sequence of the invention (such as, for example, the sequence disclosed in SEQ ID NO:X, or a fragment thereof), polynucleotide sequences of the complementary strand of a polynucleotide sequence encoding an epitope of the invention, and polynucleotide sequences which hybridize to the complementary strand under stringent hybridization conditions or alternatively, under lower stringency hybridization conditions defined supra.

[0252] The term “epitopes,” as used herein, refers to portions of a polypeptide having antigenic or immunogenic activity in an animal, preferably a mammal, and most preferably in a human. In a preferred embodiment, the present invention encompasses a polypeptide comprising an epitope, as well as the polynucleotide encoding this polypeptide. An “immunogenic epitope,” as used herein, is defined as a portion of a protein that elicits an antibody response in an animal, as determined by any method known in the art, for example, by the methods for generating antibodies described infra. (See, for example, Geysen et al., Proc. Natl. Acad. Sci. USA 81:3998-4002 (1983)). The term “antigenic epitope,” as used herein, is defined as a portion of a protein to which an antibody can immunospecifically bind its antigen as determined by any method well known in the art, for example, by the immunoassays described herein. Immunospecific binding excludes non-specific binding but does not necessarily exclude cross-reactivity with other antigens. Antigenic epitopes need not necessarily be immunogenic.

[0253] Fragments which function as epitopes may be produced by any conventional means. (See, e.g., Houghten, R. A., Proc. Natl. Acad. Sci. USA 82:5131-5135 (1985) further described in U.S. Pat. No. 4,631,211.)

[0254] In the present invention, antigenic epitopes preferably contain a sequence of at least 4, at least 5, at least 6, at least 7, more preferably at least 8, at least 9, at least 10, at least 11, at least 12, at least 13, at least 14, at least 15, at least 20, at least 25, at least 30, at least 40, at least 50, and most preferably, between about 15 to about 30 amino acids. Preferred polypeptides comprising immunogenic or antigenic epitopes are at least 10, 15, 20, 25, 30, 35, 40, 45, 50, 55, 60, 65, 70, 75, 80, 85, 90, 95, or 100 amino acid residues in length. Additional non-exclusive preferred antigenic epitopes include the antigenic epitopes disclosed herein, as well as portions thereof. Antigenic epitopes are useful, for example, to raise antibodies, including monoclonal antibodies, that specifically bind the epitope. Preferred antigenic epitopes include the antigenic epitopes disclosed herein, as well as any combination of two, three, four, five or more of these antigenic epitopes. Antigenic epitopes can be used as the target molecules in immunoassays. (See, for instance, Wilson et al., Cell 37:767-778 (1984); Sutcliffe et al., Science 219:660-666 (1983)).

[0255] Non-limiting examples of epitopes of polypeptides that can be used to generate antibodies of the invention include a polypeptide comprising, or alternatively consisting of, at least one, two, three, four, five, six or more of the portion(s) of SEQ ID NO:Y specified in column 6 of Table 1B.1. These polypeptide fragments have been determined to bear antigenic epitopes of the proteins of the invention by the analysis of the Jameson-Wolf antigenic index which is included in the DNAStar suite of computer programs. By “comprise” it is intended that a polypeptide contains at least one, two, three, four, five, six or more of the portion(s) of SEQ ID NO:Y shown in column 6 of Table 1B.1, but it may contain additional flanking residues on either the amino or carboxyl tennis of the recited portion. Such additional flanking sequences are preferably sequences naturally found adjacent to the portion; i.e., contiguous sequence shown in SEQ ID NO:Y. The flanking sequence may, however, be sequences from a heterolgous polypeptide, such as from another protein described herein or from a heterologous polypeptide not described herein. In particular embodiments, epitope portions of a polypeptide of the invention comprise one, two, three, or more of the portions of SEQ ID NO:Y shown in column 6 of Table 1B.1.

[0256] Similarly, immunogenic epitopes can be used, for example, to induce antibodies according to methods well known in the art. See, for instance, Sutcliffe et al., supra; Wilson et al., supra; Chow et al., Proc. Natl. Acad. Sci. USA 82:910-914; and Bittle et al., J. Gen. Virol. 66:2347-2354 (1985). Preferred immunogenic epitopes include the immunogenic epitopes disclosed herein, as well as any combination of two, three, four, five or more of these immunogenic epitopes. The polypeptides comprising one or more immunogenic epitopes may be presented for eliciting an antibody response together with a carrier protein, such as an albumin, to an animal system (such as rabbit or mouse), or, if the polypeptide is of sufficient length (at least about 25 amino acids), the polypeptide may be presented without a carrier. However, immunogenic epitopes comprising as few as 8 to 10 amino acids have been shown to be sufficient to raise antibodies capable of binding to, at the very least, linear epitopes in a denatured polypeptide (e.g., in Western blotting).

[0257] Epitope-bearing polypeptides of the present invention may be used to induce antibodies according to methods well known in the art including, but not limited to, in vivo immunization, in vitro immunization, and phage display methods. See, e.g., Sutcliffe et al., supra; Wilson et al., supra, and Bittle et al., J. Gen. Virol., 66:2347-2354 (1985). If in vivo immunization is used, animals may be immunized with free peptide; however, anti-peptide antibody titer may be boosted by coupling the peptide to a macromolecular carrier, such as keyhole limpet hemacyanin (KLH) or tetanus toxoid. For instance, peptides containing cysteine residues may be coupled to a carrier using a linker such as maleimidobenzoyl-N-hydroxysuccinimide ester (MBS), while other peptides may be coupled to carriers using a more general linking agent such as glutaraldehyde. Animals such as rabbits, rats and mice are immunized with either free or carrier-coupled peptides, for instance, by intraperitoneal and/or intradermal injection of emulsions containing about 100 μg of peptide or carrier protein and Freund's adjuvant or any other adjuvant known for stimulating an immune response. Several booster injections may be needed, for instance, at intervals of about two weeks, to provide a useful titer of anti-peptide antibody which can be detected, for example, by ELISA assay using free peptide adsorbed to a solid surface. The titer of anti-peptide antibodies in serum from an immunized animal may be increased by selection of anti-peptide antibodies, for instance, by adsorption to the peptide on a solid support and elution of the selected antibodies according to methods well known in the art.

[0258] As one of skill in the art will appreciate, and as discussed above, the polypeptides of the present invention (e.g., those comprising an immunogenic or antigenic epitope) can be fused to heterologous polypeptide sequences. For example, polypeptides of the present invention (including fragments or variants thereof), may be fused with the constant domain of immunoglobulins (IgA, IgE, IgG, IgM), or portions thereof (CH1, CH2, CH3, or any combination thereof and portions thereof, resulting in chimeric polypeptides. By way of another non-limiting example, polypeptides and/or antibodies of the present invention (including fragments or variants thereof) may be fused with albumin (including but not limited to recombinant human serum albumin or fragments or variants thereof (see, e.g., U.S. Pat. No. 5,876,969, issued Mar. 2, 1999, EP Patent 0 413 622, and U.S. Pat. No. 5,766,883, issued Jun. 16, 1998, herein incorporated by reference in their entirety)). In a preferred embodiment, polypeptides and/or antibodies of the present invention (including fragments or variants thereof) are fused with the mature form of human serum albumin (i.e., amino acids 1-585 of human serum albumin as shown in FIGS. 1 and 2 of EP Patent 0 322 094) which is herein incorporated by reference in its entirety. In another preferred embodiment, polypeptides and/or antibodies of the present invention (including fragments or variants thereof) are fused with polypeptide fragments comprising, or alternatively consisting of, amino acid residues 1-z of human serum albumin, where z is an integer from 369 to 419, as described in U.S. Pat. No. 5,766,883 herein incorporated by reference in its entirety. Polypeptides and/or antibodies of the present invention (including fragments or variants thereof) may be fused to either the N— or C-terminal end of the heterologous protein (e.g., immunoglobulin Fc polypeptide or human serum albumin polypeptide). Polynucleotides encoding fusion proteins of the invention are also encompassed by the invention.

[0259] Such fusion proteins as those described above may facilitate purification and may increase half-life in vivo. This has been shown for chimeric proteins consisting of the first two domains of the human CD4-polypeptide and various domains of the constant regions of the heavy or light chains of mammalian immunoglobulins. See, e.g., EP 394,827; Traunecker et al., Nature, 331:84-86 (1988). Enhanced delivery of an antigen across the epithelial barrier to the immune system has been demonstrated for antigens (e.g., insulin) conjugated to an FcRn binding partner such as IgG or Fc fragments (see, e.g., PCT Publications WO 96/22024 and WO 99/04813). IgG fusion proteins that have a disulfide-linked dimeric structure due to the IgG portion desulfide bonds have also been found to be more efficient in binding and neutralizing other molecules than monomeric polypeptides or fragments thereof alone. See, e.g., Fountoulakis et al., J. Biochem., 270:3958-3964 (1995). Nucleic acids encoding the above epitopes can also be recombined with a gene of interest as an epitope tag (e.g., the hemagglutinin (HA) tag or flag tag) to aid in detection and purification of the expressed polypeptide. For example, a system described by Janknecht et al. allows for the ready purification of non-denatured fusion proteins expressed in human cell lines (Janknecht et al., 1991, Proc. Natl. Acad. Sci. USA 88:8972-897). In this system, the gene of interest is subcloned into a vaccinia recombination plasmid such that the open reading frame of the gene is translationally fused to an amino-terminal tag consisting of six histidine residues. The tag serves as a matrix binding domain for the fusion protein. Extracts from cells infected with the recombinant vaccinia virus are loaded onto Ni2+ nitriloacetic acid-agarose column and histidine-tagged proteins can be selectively eluted with imidazole-containing buffers.

[0260] Fusion Proteins

[0261] Any polypeptide of the present invention can be used to generate fusion proteins. For example, the polypeptide of the present invention, when fused to a second protein, can be used as an antigenic tag. Antibodies raised against the polypeptide of the present invention can be used to indirectly detect the second protein by binding to the polypeptide. Moreover, because secreted proteins target cellular locations based on trafficking signals, polypeptides of the present invention which are shown to be secreted can be used as targeting molecules once fused to other proteins.

[0262] Examples of domains that can be fused to polypeptides of the present invention include not only heterologous signal sequences, but also other heterologous functional regions. The fusion does not necessarily need to be direct, but may occur through linker sequences.

[0263] In certain preferred embodiments, proteins of the invention are fusion proteins comprising an amino acid sequence that is an N and/or C-terminal deletion of a polypeptide of the invention. In preferred embodiments, the invention is directed to a fusion protein comprising an amino acid sequence that is at least 90%, 95%, 96%, 97%, 98% or 99% identical to a polypeptide sequence of the invention. Polynucleotides encoding these proteins are also encompassed by the invention.

[0264] Moreover, fusion proteins may also be engineered to improve characteristics of the polypeptide of the present invention. For instance, a region of additional amino acids, particularly charged amino acids, may be added to the N-terminus of the polypeptide to improve stability and persistence during purification from the host cell or subsequent handling and storage. Also, peptide moieties may be added to the polypeptide to facilitate purification. Such regions may be removed prior to final preparation of the polypeptide. The addition of peptide moieties to facilitate handling of polypeptides are familiar and routine techniques in the art.

[0265] As one of skill in the art will appreciate that, as discussed above, polypeptides of the present invention, and epitope-bearing fragments thereof, can be combined with heterologous polypeptide sequences. For example, the polypeptides of the present invention may be fused with heterologous polypeptide sequences, for example, the polypeptides of the present invention may be fused with the constant domain of immunoglobulins (IgA, Ig, IgG, IgM) or portions thereof (CH1, CH2, CH3, and any combination thereof, including both entire domains and portions thereof), or albumin (including, but not limited to, native or recombinant human albumin or fragments or variants thereof (see, e.g., U.S. Pat. No. 5,876,969, issued Mar. 2, 1999, EP Patent 0 413 622, and U.S. Pat. No. 5,766,883, issued Jun. 16, 1998, herein incorporated by reference in their entirety)), resulting in chimeric polypeptides. For example, EP-A-O 464 533 (Canadian counterpart 2045869) discloses fusion proteins comprising various portions of constant region of immunoglobulin molecules together with another human protein or part thereof. In many cases, the Fc part in a fusion protein is beneficial in therapy and diagnosis, and thus can result in, for example, improved pharmacokinetic properties (EP-A 0232 262). Alternatively, deleting the Fc part after the fusion protein has been expressed, detected, and purified, would be desired. For example, the Fc portion may hinder therapy and diagnosis if the fusion protein is used as an antigen for immunizations. In drug discovery, for example, human proteins, such as hIL-5, have been fused with Fc portions for the purpose of high-throughput screening assays to identify antagonists of hIL-5. See, D. Bennett et al., J. Molecular Recognition 8:52-58 (1995); K. Johanson et al., J. Biol. Chem. 270:9459-9471 (1995).

[0266] Moreover, the polypeptides of the present invention can be fused to marker sequences, such as a polypeptide which facilitates purification of the fused polypeptide. In preferred embodiments, the marker amino acid sequence is a hexa-histidine peptide, such as the tag provided in a pQE vector (QIAGEN, Inc., 9259 Eton Avenue, Chatsworth, Calif., 91311), among others, many of which are commercially available. As described in Gentz et al., Proc. Natl. Acad. Sci. USA 86:821-824 (1989), for instance, hexa-histidine provides for convenient purification of the fusion protein. Another peptide tag useful for purification, the “HA” tag, corresponds to an epitope derived from the influenza hemagglutinin protein (Wilson et al., Cell 37:767 (1984)).

[0267] Additional fusion proteins of the invention may be generated through the techniques of gene-shuffling, motif-shuffling, exon-shuffling, and/or codon-shuffling (collectively referred to as “DNA shuffling”). DNA shuffling may be employed to modulate the activities of polypeptides of the invention, such methods can be used to generate polypeptides with altered activity, as well as agonists and antagonists of the polypeptides. See, generally, U.S. Pat. Nos. 5,605,793; 5,811,238; 5,830,721; 5,834,252; and 5,837,458, and Patten et al., Curr. Opinion Biotechnol. 8:724-33 (1997); Harayama, Trends Biotechnol. 16(2):76-82 (1998); Hansson, et al., J. Mol. Biol. 287:265-76 (1999); and Lorenzo and Blasco, Biotechniques 24(2):308-13 (1998) (each of these patents and publications are hereby incorporated by reference in its entirety). In one embodiment, alteration of polynucleotides corresponding to SEQ ID NO:X and the polypeptides encoded by these polynucleotides may be achieved by DNA shuffling. DNA shuffling involves the assembly of two or more DNA segments by homologous or site-specific recombination to generate variation in the polynucleotide sequence. In another embodiment, polynucleotides of the invention, or the encoded polypeptides, may be altered by being subjected to random mutagenesis by error-prone PCR, random nucleotide insertion or other methods prior to recombination. In another embodiment, one or more components, motifs, sections, parts, domains, fragments, etc., of a polynucleotide encoding a polypeptide of the invention may be recombined with one or more components, motifs, sections, parts, domains, fragments, etc. of one or more heterologous molecules.

[0268] Thus, any of these above fusions can be engineered using the polynucleotides or the polypeptides of the present invention.

[0269] Recombinant and Synthetic Production of Polypeptides of the Invention

[0270] The present invention also relates to vectors containing the polynucleotide of the present invention, host cells, and the production of polypeptides by synthetic and recombinant techniques. The vector may be, for example, a phage, plasmid, viral, or retroviral vector. Retroviral vectors may be replication competent or replication defective. In the latter case, viral propagation generally will occur only in complementing host cells.

[0271] The polynucleotides of the invention may be joined to a vector containing a selectable marker for propagation in a host. Generally, a plasmid vector is introduced in a precipitate, such as a calcium phosphate precipitate, or in a complex with a charged lipid. If the vector is a virus, it may be packaged in vitro using an appropriate packaging cell line and then transduced into host cells.

[0272] The polynucleotide insert should be operatively linked to an appropriate promoter, such as the phage lambda PL promoter, the E. coli lac, trp, phoA and tac promoters, the SV40 early and late promoters and promoters of retroviral LTRs, to name a few. Other suitable promoters will be known to the skilled artisan. The expression constructs will further contain sites for transcription initiation, termination, and, in the transcribed region, a ribosome binding site for translation. The coding portion of the transcripts expressed by the constructs will preferably include a translation initiating codon at the beginning and a termination codon (UAA, UGA or UAG) appropriately positioned at the end of the polypeptide to be translated.

[0273] As indicated, the expression vectors will preferably include at least one selectable marker. Such markers include dihydrofolate reductase, G418, glutamine synthase, or neomycin resistance for eukaryotic cell culture, and tetracycline, kanamycin or ampicillin resistance genes for culturing in E. coli and other bacteria. Representative examples of appropriate hosts include, but are not limited to, bacterial cells, such as E. coli, Streptomyces and Salmonella typhimurium cells; fungal cells, such as yeast cells (e.g., Saccharomyces cerevisiae or Pichia pastoris (ATCC Accession No. 201178)); insect cells such as Drosophila S2 and Spodoptera Sf9 cells; animal cells such as CHO, COS, 293, and Bowes melanoma cells; and plant cells. Appropriate culture mediums and conditions for the above-described host cells are known in the art.

[0274] Among vectors preferred for use in bacteria include pQE70, pQE60 and pQE-9, available from QIAGEN, Inc.; pBluescript vectors, Phagescript vectors, pNH8A, pNH16a, pNH18A, pNH46A, available from Stratagene Cloning Systems, Inc.; and ptrc99a, pKK223-3, pKK233-3, pDR540, pRIT5 available from Pharmacia Biotech, Inc. Among preferred eukaryotic vectors are pWLNEO, pSV2CAT, pOG44, pXT1 and pSG available from Stratagene; and pSVK3, pBPV, pMSG and pSVL available from Pharmacia. Preferred expression vectors for use in yeast systems include, but are not limited to pYES2, pYD1, pTEl1/Zeo, pYES2/GS, pPICZ, pGAPZ, pGAPZalph, pPIC9, pPIC3.5, pH[L-D2, pHIL-S1, pPIC3.5K, pPIC9K, and PAO815 (all available from Invitrogen, Carlbad, Calif.). Other suitable vectors will be readily apparent to the skilled artisan.

[0275] Vectors which use glutamine synthase (GS) or DHFR as the selectable markers can be amplified in the presence of the drugs methionine sulphoximine or methotrexate, respectively. An advantage of glutamine synthase based vectors are the availabilty of cell lines (e.g., the murine myeloma cell line, NSO) which are glutamine synthase negative. Glutamine synthase expression systems can also function in glutamine synthase expressing cells (e.g., Chinese Hamster Ovary (CHO) cells) by providing additional inhibitor to prevent the functioning of the endogenous gene. A glutamine synthase expression system and components thereof are detailed in PCT publications: WO87/04462; WO86/05807; WO89/01036; WO89/10404; and WO91/06657, which are hereby incorporated in their entireties by reference herein. Additionally, glutamine synthase expression vectors can be obtained from Lonza Biologics, Inc. (Portsmouth, N.H.). Expression and production of monoclonal antibodies using a GS expression system in murine myeloma cells is described in Bebbington et al., Bio/technology 10:169(1992) and in Biblia and Robinson Biotechnol. Prog. 11:1 (1995) which are herein incorporated by reference.

[0276] The present invention also relates to host cells containing the above-described vector constructs described herein, and additionally encompasses host cells containing nucleotide sequences of the invention that are operably associated with one or more heterologous control regions (e.g., promoter and/or enhancer) using techniques known of in the art. The host cell can be a higher eukaryotic cell, such as a mammalian cell (e.g., a human derived cell), or a lower eukaryotic cell, such as a yeast cell, or the host cell can be a prokaryotic cell, such as a bacterial cell. A host strain may be chosen which modulates the expression of the inserted gene sequences, or modifies and processes the gene product in the specific fashion desired. Expression from certain promoters can be elevated in the presence of certain inducers; thus expression of the genetically engineered polypeptide may be controlled. Furthermore, different host cells have characteristics and specific mechanisms for the translational and post-translational processing and modification (e.g., phosphorylation, cleavage) of proteins. Appropriate cell lines can be chosen to ensure the desired modifications and processing of the foreign protein expressed.

[0277] Introduction of the nucleic acids and nucleic acid constructs of the invention into the host cell can be effected by calcium phosphate transfection, DEAE-dextran mediated transfection, cationic lipid-mediated transfection, electroporation, transduction, infection, or other methods. Such methods are described in many standard laboratory manuals, such as Davis et al., Basic Methods In Molecular Biology (1986). It is specifically contemplated that the polypeptides of the present invention may in fact be expressed by a host cell lacking a recombinant vector.

[0278] In addition to encompassing host cells containing the vector constructs discussed herein, the invention also encompasses primary, secondary, and immortalized host cells of vertebrate origin, particularly mammalian origin, that have been engineered to delete or replace endogenous genetic material (e.g., the coding sequence), and/or to include genetic material (e.g., heterologous polynucleotide sequences) that is operably associated with polynucleotides of the invention, and which activates, alters, and/or amplifies endogenous polynucleotides. For example, techniques known in the art may be used to operably associate heterologous control regions (e.g., promoter and/or enhancer) and endogenous polynucleotide sequences via homologous recombination (see, e.g., U.S. Pat. No. 5,641,670, issued Jun. 24, 1997; International Publication Number WO 96/29411; International Publication Number WO 94/12650; Koller et al., Proc. Natl. Acad Sci. USA 86:8932-8935 (1989); and Zijlstra et al., Nature 342:435438 (1989), the disclosures of each of which are incorporated by reference in their entireties).

[0279] Polypeptides of the invention can be recovered and purified from recombinant cell cultures by well-known methods including ammonium sulfate or ethanol precipitation, acid extraction, anion or cation exchange chromatography, phosphocellulose chromatography, hydrophobic interaction chromatography, affinity chromatography, hydroxylapatite chromatography and lectin chromatography. Most preferably, high performance liquid chromatography (“HPLC”) is employed for purification.

[0280] Polypeptides of the present invention can also be recovered from: products purified from natural sources, including bodily fluids, tissues and cells, whether directly isolated or cultured; products of chemical synthetic procedures; and products produced by recombinant techniques from a prokaryotic or eukaryotic host, including, for example, bacterial, yeast, higher plant, insect, and mammalian cells. Depending upon the host employed in a recombinant production procedure, the polypeptides of the present invention may be glycosylated or may be non-glycosylated. In addition, polypeptides of the invention may also include an initial modified methionine residue, in some cases as a result of host-mediated processes. Thus, it is well known in the art that the N-terminal methionine encoded by the translation initiation codon generally is removed with high efficiency from any protein after translation in all eukaryotic cells. While the N-terminal methionine on most proteins also is efficiently removed in most prokaryotes, for some proteins, this prokaryotic removal process is inefficient, depending on the nature of the amino acid to which the N-terminal methionine is covalently linked.

[0281] In one embodiment, the yeast Pichia pastoris is used to express polypeptides of the invention in a eukaryotic system. Pichia pastoris is a methylotrophic yeast which can metabolize methanol as its sole carbon source. A main step in the methanol metabolization pathway is the oxidation of methanol to formaldehyde using O₂. This reaction is catalyzed by the enzyme alcohol oxidase. In order to metabolize methanol as its sole carbon source, Pichia pastoris must generate high levels of alcohol oxidase due, in part, to the relatively low affinity of alcohol oxidase for O₂. Consequently, in a growth medium depending on methanol as a main carbon source, the promoter region of one of the two alcohol oxidase genes (AOX1) is highly active. In the presence of methanol, alcohol oxidase produced from the AOX1 gene comprises up to approximately 30% of the total soluble protein in Pichia pastoris. See Ellis, S. B., et al., Mol. Cell. Biol. 5:1111-21 (1985); Koutz, P. J, et al., Yeast 5:167-77 (1989); Tschopp, J. F., et al., Nucl. Acids Res. 15:3859-76 (1987). Thus, a heterologous coding sequence, such as, for example, a polynucleotide of the present invention, under the transcriptional regulation of all or part of the AOX1 regulatory sequence is expressed at exceptionally high levels in Pichia yeast grown in the presence of methanol.

[0282] In one example, the plasmid vector pPIC9K is used to express DNA encoding a polypeptide of the invention, as set forth herein, in a Pichea yeast system essentially as described in “Pichia Protocols: Methods in Molecular Biology,” D. R. Higgins and J. Cregg, eds. The Humana Press, Totowa, N.J., 1998. This expression vector allows expression and secretion of a polypeptide of the invention by virtue of the strong AOX1 promoter linked to the Pichia pastoris alkaline phosphatase (PHO) secretory signal peptide (i.e., leader) located upstream of a multiple cloning site.

[0283] Many other yeast vectors could be used in place of pPIC9K, such as, pYES2, pYD1, pTEF1/Zeo, pYES2/GS, pPICZ, pGAPZ, pGAPZalpha, pPIC9, pPIC3.5, pHL-D2, pH[L-S1, pPIC3.5K, and PA0815, as one skilled in the art would readily appreciate, as long as the proposed expression construct provides appropriately located signals for transcription, translation, secretion (if desired), and the like, including an in-frame AUG as required.

[0284] In another embodiment, high-level expression of a heterologous coding sequence, such as, for example, a polynucleotide of the present invention, may be achieved by cloning the heterologous polynucleotide of the invention into an expression vector such as, for example, pGAPZ or pGAPZalpha, and growing the yeast culture in the absence of methanol.

[0285] In addition to encompassing host cells containing the vector constructs discussed herein, the invention also encompasses primary, secondary, and immortalized host cells of vertebrate origin, particularly mammalian origin, that have been engineered to delete or replace endogenous genetic material (e.g., coding sequence), and/or to include genetic material (e.g., heterologous polynucleotide sequences) that is operably associated with polynucleotides of the invention, and which activates, alters, and/or amplifies endogenous polynucleotides. For example, techniques known in the art may be used to operably associate heterologous control regions (e.g., promoter and/or enhancer) and endogenous polynucleotide sequences via homologous recombination (see, e.g., U.S. Pat. No. 5,641,670, issued Jun. 24, 1997; International Publication No. WO 96/29411, published Sep. 26, 1996; International Publication No. WO 94/12650, published Aug. 4, 1994; Koller et al., Proc. Natl. Acad. Sci. USA 86:8932-8935 (1989); and Zijlstra et al., Nature 342:435438 (1989), the disclosures of each of which are incorporated by reference in their entireties).

[0286] In addition, polypeptides of the invention can be chemically synthesized using techniques known in the art (e.g., see Creighton, 1983, Proteins: Structures and Molecular Principles, W. H. Freeman & Co., N.Y., and Hunkapiller et al., Nature, 310:105-111 (1984)). For example, a polypeptide corresponding to a fragment of a polypeptide can be synthesized by use of a peptide synthesizer. Furthermore, if desired, nonclassical amino acids or chemical amino acid analogs can be introduced as a substitution or addition into the polypeptide sequence. Non-classical amino acids include, but are not limited to, to the D-isomers of the common amino acids, 2,4-diaminobutyric acid, a-amino isobutyric acid, 4-aminobutyric acid, Abu, 2-amino butyric acid, g-Abu, e-Ahx, 6-amino hexanoic acid, Aib, 2-amino isobutyric acid, 3-amino propionic acid, ornithine, norleucine, norvaline, hydroxyproline, sarcosine, citrulline, homocitrulline, cysteic acid, t-butylglycine, t-butylalanine, phenylglycine, cyclohexylalanine, b-alanine, fluoro-amino acids, designer amino acids such as b-methyl amino acids, Ca-methyl amino acids, Na-methyl amino acids, and amino acid analogs in general. Furthermore, the amino acid can be D (dextrorotary) or L (levorotary).

[0287] The invention encompasses polypeptides of the present invention which are differentially modified during or after translation, e.g., by glycosylation, acetylation, phosphorylation, amidation, derivatization by known protecting/blocking groups, proteolytic cleavage, linkage to an antibody molecule or other cellular ligand, etc. Any of numerous chemical modifications may be carried out by known techniques, including but not limited, to specific chemical cleavage by cyanogen bromide, trypsin, chymotrypsin, papain, V8 protease, NaBH₄; acetylation, formylation, oxidation, reduction; metabolic synthesis in the presence of tunicamycin; etc.

[0288] Additional post-translational modifications encompassed by the invention include, for example, e.g., N-linked or O-linked carbohydrate chains, processing of N-terminal or C-terminal ends), attachment of chemical moieties to the amino acid backbone, chemical modifications of N-linked or O-linked carbohydrate chains, and addition or deletion of an N-terminal methionine residue as a result of procaryotic host cell expression. The polypeptides may also be modified with a detectable label, such as an enzymatic, fluorescent, isotopic or affinity label to allow for detection and isolation of the protein.

[0289] Examples of suitable enzymes include horseradish peroxidase, alkaline phosphatase, beta-galactosidase, or acetylcholinesterase; examples of suitable prosthetic group complexes include streptavidin/biotin and avidin/biotin; examples of suitable fluorescent materials include umbelliferone, fluorescein, fluorescein isothiocyanate, rhodamine, dichlorotriazinylamine fluorescein, dansyl chloride or phycoerythrin; an example of a luminescent material includes luminol; examples of bioluminescent materials include luciferase, luciferin, and aequorin; and examples of suitable radioactive material include iodine (¹²¹I, ¹²³I, ¹²⁵I, ¹³¹I), carbon (¹⁴C), sulfur (³⁵S), tritium (³H), indium (¹¹¹In, ¹¹²In, ^{113m}In, ^{115m}In), technetium (⁹⁹Tc, ^{99m}Tc), thallium (²⁰Ti), gallium (⁶⁸Ga, ⁶⁷Ga), palladium (¹⁰³Pd), molybdenum (⁹⁹Mo), xenon (¹³³Xe), fluorine (¹⁸F), ¹⁵³Sm ¹⁷⁷Lu, ¹⁵⁹Gd, ¹⁴⁹Pm ¹⁴⁰La, ¹⁷⁵Yb, ¹⁶⁶Ho, ⁹⁰Y, ⁴⁷Sc, ¹⁸⁶Re, ¹⁸⁸Re, ¹⁴²Pr, ¹⁰⁵Rh, and ⁹⁷Ru.

[0290] In specific embodiments, a polypeptide of the present invention or fragment or variant thereof is attached to macrocyclic chelators that associate with radiometal ions, including but not limited to, ¹⁷⁷Lu, ⁹⁰Y, ¹⁶⁶Ho, and ¹⁵³Sm, to polypeptides. In a preferred embodiment, the radiometal ion associated with the macrocyclic chelators is ¹¹¹In. In another preferred embodiment, the radiometal ion associated with the macrocyclic chelator is ⁹⁰Y. In specific embodiments, the macrocyclic chelator is 1,4,7,10-tetraazacyclododecane-N,N′,N″,N′″-tetraacetic acid (DOTA). In other specific embodiments, DOTA is attached to an antibody of the invention or fragment thereof via a linker molecule. Examples of linker molecules useful for conjugating DOTA to a polypeptide are commonly known in the art—see, for example, DeNardo et al., Clin Cancer Res. 4(10):2483-90 (1998); Peterson et al., Bioconjug. Chem. 10(4):553-7 (1999); and Zimmerman et al, Nucl. Med. Biol. 26(8):943-50 (1999); which are hereby incorporated by reference in their entirety.

[0291] As mentioned, the proteins of the invention may be modified by either natural processes, such as posttranslational processing, or by chemical modification techniques which are well known in the art. It will be appreciated that the same type of modification may be present in the same or varying degrees at several sites in a given polypeptide. Polypeptides of the invention may be branched, for example, as a result of ubiquitination, and they may be cyclic, with or without branching. Cyclic, branched, and branched cyclic polypeptides may result from posttranslation natural processes or may be made by synthetic methods. Modifications include acetylation, acylation, ADP-ribosylation, amidation, covalent attachment of flavin, covalent attachment of a heme moiety, covalent attachment of a nucleotide or nucleotide derivative, covalent attachment of a lipid or lipid derivative, covalent attachment of phosphotidylinositol, cross-linking, cyclization, disulfide bond formation, demethylation, formation of covalent cross-links, formation of cysteine, formation of pyroglutamate, formylation, gamma-carboxylation, glycosylation, GPI anchor formation, hydroxylation, iodination, methylation, myristoylation, oxidation, pegylation, proteolytic processing, phosphorylation, prenylation, racemization, selenoylation, sulfation, transfer-RNA mediated addition of amino acids to proteins such as arginylation, and ubiquitination. (See, for instance, PROTEINS—STRUCTURE AND MOLECULAR PROPERTIES, 2nd Ed., T. E. Creighton, W. H. Freeman and Company, New York (1993); POSTTRANSLATIONAL COVALENT MODIFICATION OF PROTEINS, B. C. Johnson, Ed., Academic Press, New York, pgs. 1-12 (1983); Seifter et al., Meth. Enzymol. 182:626-646 (1990); Rattan et al., Ann. N.Y. Acad. Sci. 663:48-62 (1992)).

[0292] Also provided by the invention are chemically modified derivatives of the polypeptides of the invention which may provide additional advantages such as increased solubility, stability and circulating time of the polypeptide, or decreased immunogenicity (see U.S. Pat. No. 4,179,337). The chemical moieties for derivitization may be selected from water soluble polymers such as polyethylene glycol, ethylene glycol/propylene glycol copolymers, carboxymethylcellulose, dextran, polyvinyl alcohol and the like. The polypeptides may be modified at random positions within the molecule, or at predetermined positions within the molecule and may include one, two, three or more attached chemical moieties.

[0293] The polymer may be of any molecular weight, and may be branched or unbranched. For polyethylene glycol, the preferred molecular weight is between about 1 kDa and about 100 kDa (the term “about” indicating that in preparations of polyethylene glycol, some molecules will weigh more, some less, than the stated molecular weight) for ease in handling and manufacturing. Other sizes may be used, depending on the desired therapeutic profile (e.g., the duration of sustained release desired, the effects, if any on biological activity, the ease in handling, the degree or lack of antigenicity and other known effects of the polyethylene glycol to a therapeutic protein or analog). For example, the polyethylene glycol may have an average molecular weight of about 200, 500, 1000, 1500, 2000, 2500, 3000, 3500, 4000, 4500, 5000, 5500, 6000, 6500, 7000, 7500, 8000, 8500, 9000, 9500, 10,000, 10,500, 11,000, 11,500, 12,000, 12,500, 13,000, 13,500, 14,000, 14,500, 15,000, 15,500, 16,000, 16,500, 17,000, 17,500, 18,000, 18,500, 19,000, 19,500, 20,000, 25,000, 30,000, 35,000, 40,000, 45,000, 50,000, 55,000, 60,000, 65,000, 70,000, 75,000, 80,000, 85,000, 90,000, 95,000, or 100,000 kDa.

[0294] As noted above, the polyethylene glycol may have a branched structure. Branched polyethylene glycols are described, for example, in U.S. Pat. No. 5,643,575; Morpurgo et al., Appl. Biochem. Biotechnol. 56:59-72 (1996); Vorobjev et al., Nucleosides Nucleotides 18:2745-2750 (1999); and Caliceti et al., Bioconjug. Chem. 10:638-646 (1999), the disclosures of each of which are incorporated herein by reference.

[0295] The polyethylene glycol molecules (or other chemical moieties) should be attached to the protein with consideration of effects on functional or antigenic domains of the protein. There are a number of attachment methods available to those skilled in the art, such as, for example, the method disclosed in EP 0 401 384 (coupling PEG to G-CSF), herein incorporated by reference; see also Malik et al., Exp. Hematol. 20:1028-1035 (1992), reporting pegylation of GM-CSF using tresyl chloride. For example, polyethylene glycol may be covalently bound through amino acid residues via a reactive group, such as a free amino or carboxyl group. Reactive groups are those to which an activated polyethylene glycol molecule may be bound. The amino acid residues having a free amino group may include lysine residues and the N-terminal amino acid residues; those having a free carboxyl group may include aspartic acid residues glutamic acid residues and the C-terminal amino acid residue. Sulfhydryl groups may also be used as a reactive group for attaching the polyethylene glycol molecules. Preferred for therapeutic purposes is attachment at an amino group, such as attachment at the N-terminus or lysine group.

[0296] As suggested above, polyethylene glycol may be attached to proteins via linkage to any of a number of amino acid residues. For example, polyethylene glycol can be linked to proteins via covalent bonds to lysine, histidine, aspartic acid, glutamic acid, or cysteine residues. One or more reaction chemistries may be employed to attach polyethylene glycol to specific amino acid residues (e.g., lysine, histidine, aspartic acid, glutamic acid, or cysteine) of the protein or to more than one type of amino acid residue (e.g., lysine, histidine, aspartic acid, glutamic acid, cysteine and combinations thereof) of the protein.

[0297] One may specifically desire proteins chemically modified at the N-terminus. Using polyethylene glycol as an illustration of the present composition, one may select from a variety of polyethylene glycol molecules (by molecular weight, branching, etc.), the proportion of polyethylene glycol molecules to protein (polypeptide) molecules in the reaction mix, the type of pegylation reaction to be performed, and the method of obtaining the selected N-terminally pegylated protein. The method of obtaining the N-terminally pegylated preparation (i.e., separating this moiety from other monopegylated moieties if necessary) may be by purification of the N-terminally pegylated material from a population of pegylated protein molecules. Selective proteins chemically modified at the N-terminus modification may be accomplished by reductive alkylation which exploits differential reactivity of different types of primary amino groups (lysine versus the N-terminal) available for derivatization in a particular protein. Under the appropriate reaction conditions, substantially selective derivatization of the protein at the N-terminus with a carbonyl group containing polymer is achieved.

[0298] As indicated above, pegylation of the proteins of the invention may be accomplished by any number of means. For example, polyethylene glycol may be attached to the protein either directly or by an intervening linker. Linkerless systems for attaching polyethylene glycol to proteins are described in Delgado et al., Crit. Rev. Thera. Drug Carrier Sys. 9:249-304 (1992); Francis et al., Intern. J. of Hematol. 68:1-18 (1998); U.S. Pat. No. 4,002,531; U.S. Pat. No. 5,349,052; WO 95/06058; and WO 98/32466, the disclosures of each of which are incorporated herein by reference.

[0299] One system for attaching polyethylene glycol directly to amino acid residues of proteins without an intervening linker employs tresylated MPEG, which is produced by the modification of monmethoxy polyethylene glycol (MPEG) using tresylchloride (ClSO₂CH₂CF₃). Upon reaction of protein with tresylated MPEG, polyethylene glycol is directly attached to amine groups of the protein. Thus, the invention includes protein-polyethylene glycol conjugates produced by reacting proteins of the invention with a polyethylene glycol molecule having a 2,2,2-trifluoreothane sulphonyl group.

[0300] Polyethylene glycol can also be attached to proteins using a number of different intervening linkers. For example, U.S. Pat. No. 5,612,460, the entire disclosure of which is incorporated herein by reference, discloses urethane linkers for connecting polyethylene glycol to proteins. Protein-polyethylene glycol conjugates wherein the polyethylene glycol is attached to the protein by a linker can also be produced by reaction of proteins with compounds such as MPEG-succinimidylsuccinate, MPEG activated with 1,1′-carbonyldiimidazole, MPEG-2,4,5-trichloropenylcarbonate, MPEG-p-nitrophenolcarbonate, and various MPEG-succinate derivatives. A number of additional polyethylene glycol derivatives and reaction chemistries for attaching polyethylene glycol to proteins are described in International Publication No. WO 98/32466, the entire disclosure of which is incorporated herein by reference. Pegylated protein products produced using the reaction chemistries set out herein are included within the scope of the invention.

[0301] The number of polyethylene glycol moieties attached to each protein of the invention (i.e., the degree of substitution) may also vary. For example, the pegylated proteins of the invention may be linked, on average, to 1, 2, 3, 4, 5, 6, 7, 8, 9, 10, 12, 15, 17, 20, or more polyethylene glycol molecules. Similarly, the average degree of substitution within ranges such as 1-3, 2-4, 3-5, 4-6, 5-7, 6-8, 7-9, 8-10, 9-11, 10-12, 11-13, 12-14, 13-15, 14-16, 15-17-19, or 18-20 polyethylene glycol moieties per protein molecule. Methods for determining the degree of substitution are discussed, for example, in Delgado et al., Crit. Rev. Thera. Drug Carrier Sys. 9:249-304 (1992).

[0302] The polypeptides of the invention can be recovered and purified from chemical synthesis and recombinant cell cultures by standard methods which include, but are not limited to, ammonium sulfate or ethanol precipitation, acid extraction, anion or cation exchange chromatography, phosphocellulose chromatography, hydrophobic interaction chromatography, affinity chromatography, hydroxylapatite chromatography and lectin chromatography. Most preferably, high performance liquid chromatography (“HPLC”) is employed for purification. Well known techniques for refolding protein may be employed to regenerate active conformation when the polypeptide is denatured during isolation and/or purification.

[0303] The polypeptides of the invention may be in monomers or multimers (i.e., dimers, trimers, tetramers and higher multimers). Accordingly, the present invention relates to monomers and multimers of the polypeptides of the invention, their preparation, and compositions (preferably, Therapeutics) containing them. In specific embodiments, the polypeptides of the invention are monomers, dimers, trimers or tetramers. In additional embodiments, the multimers of the invention are at least dimers, at least trimers, or at least tetramers.

[0304] Multimers encompassed by the invention may be homomers or heteromers. As used herein, the term homomer refers to a multimer containing only polypeptides corresponding to a protein of the invention (e.g., the amino acid sequence of SEQ ID NO:Y, an amino acid sequence encoded by SEQ ID NO:X or the complement of SEQ ID NO:X, the amino acid sequence encoded by the portion of SEQ ED NO:X as defined in columns 8 and 9 of Table 2, and/or an amino acid sequence encoded by cDNA contained in ATCC Deposit No:Z (including fragments, variants, splice variants, and fusion proteins, corresponding to these as described herein)). These homomers may contain polypeptides having identical or different amino acid sequences. In a specific embodiment, a homomer of the invention is a multimer containing only polypeptides having an identical amino acid sequence. In another specific embodiment, a homomer of the invention is a multimer containing polypeptides having different amino acid sequences. In specific embodiments, the multimer of the invention is a homodimer (e.g., containing two polypeptides having identical or different amino acid sequences) or a homotrimer (e.g., containing three polypeptides having identical and/or different amino acid sequences). In additional embodiments, the homomeric multimer of the invention is at least a homodimer, at least a homotrimer, or at least a homotetramer.

[0305] As used herein, the term heteromer refers to a multimer containing one or more heterologous polypeptides (i.e., polypeptides of different proteins) in addition to the polypeptides of the invention. In a specific embodiment, the multimer of the invention is a heterodimer, a heterotrimer, or a heterotetramer. In additional embodiments, the heteromeric multimer of the invention is at least a heterodimer, at least a heterotrimer, or at least a heterotetramer.

[0306] Multimers of the invention may be the result of hydrophobic, hydrophilic, ionic and/or covalent associations and/or may be indirectly linked by, for example, liposome formation. Thus, in one embodiment, multimers of the invention, such as, for example, homodimers or homotrimers, are formed when polypeptides of the invention contact one another in solution. In another embodiment, heteromultimers of the invention, such as, for example, heterotrimers or heterotetramers, are formed when polypeptides of the invention contact antibodies to the polypeptides of the invention (including antibodies to the heterologous polypeptide sequence in a fusion protein of the invention) in solution. In other embodiments, multimers of the invention are formed by covalent associations with and/or between the polypeptides of the invention. Such covalent associations may involve one or more amino acid residues contained in the polypeptide sequence (e.g., that recited in SEQ ID NO:Y, encoded by the portion of SEQ ID NO:X as defined in columns 8 and 9 of Table 2, and/or encoded by the cDNA contained in ATCC Deposit No:Z). In one instance, the covalent associations are cross-linking between cysteine residues located within the polypeptide sequences which interact in the native (i.e., naturally occurring) polypeptide. In another instance, the covalent associations are the consequence of chemical or recombinant manipulation. Alternatively, such covalent associations may involve one or more amino acid residues contained in the heterologous polypeptide sequence in a fusion protein. In one example, covalent associations are between the heterologous sequence contained in a fusion protein of the invention (see, e.g., U.S. Pat. No. 5,478,925). In a specific example, the covalent associations are between the heterologous sequence contained in a Fc fusion protein of the invention (as described herein). In another specific example, covalent associations of fusion proteins of the invention are between heterologous polypeptide sequence from another protein that is capable of forming covalently associated multimers, such as for example, osteoprotegerin (see, e.g., International Publication NO: WO 98/49305, the contents of which are herein incorporated by reference in its entirety). In another embodiment, two or more polypeptides of the invention are joined through peptide linkers. Examples include those peptide linkers described in U.S. Pat. No. 5,073,627 (hereby incorporated by reference). Proteins comprising multiple polypeptides of the invention separated by peptide linkers may be produced using conventional recombinant DNA technology.

[0307] Another method for preparing multimer polypeptides of the invention involves use of polypeptides of the invention fused to a leucine zipper or isoleucine zipper polypeptide sequence. Leucine zipper and isoleucine zipper domains are polypeptides that promote multimerization of the proteins in which they are found. Leucine zippers were originally identified in several DNA-binding proteins (Landschulz et al., Science 240:1759, (1988)), and have since been found in a variety of different proteins. Among the known leucine zippers are naturally occurring peptides and derivatives thereof that dimerize or trimerize. Examples of leucine zipper domains suitable for producing soluble multimeric proteins of the invention are those described in PCT application WO 94/10308, hereby incorporated by reference. Recombinant fusion proteins comprising a polypeptide of the invention fused to a polypeptide sequence that dimerizes or trimerizes in solution are expressed in suitable host cells, and the resulting soluble multimeric fusion protein is recovered from the culture supernatant using techniques known in the art.

[0308] Trimeric polypeptides of the invention may offer the advantage of enhanced biological activity. Preferred leucine zipper moieties and isoleucine moieties are those that preferentially form trimers. One example is a leucine zipper derived from lung surfactant protein D (SPD), as described in Hoppe et al. (FEBS Letters 344:191, (1994)) and in U.S. patent application Ser. No. 08/446,922, hereby incorporated by reference. Other peptides derived from naturally occurring trimeric proteins may be employed in preparing trimeric polypeptides of the invention.

[0309] In another example, proteins of the invention are associated by interactions between Flag® polypeptide sequence contained in fusion proteins of the invention containing Flag® polypeptide sequence. In a further embodiment, proteins of the invention are associated by interactions between heterologous polypeptide sequence contained in Flag® fusion proteins of the invention and anti-Flag® antibody.

[0310] The multimers of the invention may be generated using chemical techniques known in the art. For example, polypeptides desired to be contained in the multimers of the invention may be chemically cross-linked using linker molecules and linker molecule length optimization techniques known in the art (see, e.g., U.S. Pat. No. 5,478,925, which is herein incorporated by reference in its entirety). Additionally, multimers of the invention may be generated using techniques known in the art to form one or more inter-molecule cross-links between the cysteine residues located within the sequence of the polypeptides desired to be contained in the multimer (see, e.g., U.S. Pat. No. 5,478,925, which is herein incorporated by reference in its entirety). Further, polypeptides of the invention may be routinely modified by the addition of cysteine or biotin to the C-terminus or N-terminus of the polypeptide and techniques known in the art may be applied to generate multimers containing one or more of these modified polypeptides (see, e.g., U.S. Pat. No. 5,478,925, which is herein incorporated by reference in its entirety). Additionally, techniques known in the art may be applied to generate liposomes containing the polypeptide components desired to be contained in the multimer of the invention (see, e.g., U.S. Pat. No. 5,478,925, which is herein incorporated by reference in its entirety).

[0311] Alternatively, multimers of the invention may be generated using genetic engineering techniques known in the art. In one embodiment, polypeptides contained in multimers of the invention are produced recombinantly using fusion protein technology described herein or otherwise known in the art (see, e.g., U.S. Pat. No. 5,478,925, which is herein incorporated by reference in its entirety). In a specific embodiment, polynucleotides coding for a homodimer of the invention are generated by ligating a polynucleotide sequence encoding a polypeptide of the invention to a sequence encoding a hiker polypeptide and then further to a synthetic polynucleotide encoding the translated product of the polypeptide in the reverse orientation from the original C-terminus to the N-terminus (lacking the leader sequence) (see, e.g., U.S. Pat. No. 5,478,925, which is herein incorporated by reference in its entirety). In another embodiment, recombinant techniques described herein or otherwise known in the art are applied to generate recombinant polypeptides of the invention which contain a transmembrane domain (or hydrophobic or signal peptide) and which can be incorporated by membrane reconstitution techniques into liposomes (see, e.g., U.S. Pat. No. 5,478,925, which is herein incorporated by reference in its entirety).

[0312] Antibodies

[0313] Further polypeptides of the invention relate to antibodies and T-cell antigen receptors (TCR) which immunospecifically bind a polypeptide, polypeptide fragment, or variant of the invention (e.g., a polypeptide or fragment or variant of the amino acid sequence of SEQ ID NO:Y or a polypeptide encoded by the cDNA contained in ATCC Deposit No:Z, and/or an epitope, of the present invention) as determined by immunoassays well known in the art for assaying specific antibody-antigen binding. Antibodies of the invention include, but are not limited to, polyclonal, monoclonal, multispecific, human, humanized or chimeric antibodies, single chain antibodies, Fab fragments, F(ab′) fragments, fragments produced by a Fab expression library, anti-idiotypic (anti-Id) antibodies (including, e.g., anti-Id antibodies to antibodies of the invention), intracellularly-made antibodies (i.e., intrabodies), and epitope-binding fragments of any of the above. The term “antibody,” as used herein, refers to immunoglobulin molecules and immunologically active portions of immunoglobulin molecules, i.e., molecules that contain an antigen binding site that immunospecifically binds an antigen. The immunoglobulin molecules of the invention can be of any type (e.g., IgG, IgE, IgM, IgD, IgA and IgY), class (e.g., IgG1, IgG2, IgG3, IgG4, IgA1 and IgA2) or subclass of immunoglobulin molecule. In preferred embodiments, the immunoglobulin molecules of the invention are IgG1. In other preferred embodiments, the immunoglobulin molecules of the invention are IgG4.

[0314] Most preferably the antibodies are human antigen-binding antibody fragments of the present invention and include, but are not limited to, Fab, Fab′ and F(ab′)2, Fd, single-chain Fvs (scFv), single-chain antibodies, disulfide-linked Fvs (sdFv) and fragments comprising either a VL or VH domain. Antigen-binding antibody fragments, including single-chain antibodies, may comprise the variable region(s) alone or in combination with the entirety or a portion of the following: hinge region, CH1, CH2, and CH3 domains. Also included in the invention are antigen-binding fragments also comprising any combination of variable region(s) with a hinge region, CH1, CH2, and CH3 domains. The antibodies of the invention may be from any animal origin including birds and mammals. Preferably, the antibodies are human, murine (e.g., mouse and rat), donkey, ship rabbit, goat, guinea pig, camel, horse, or chicken. As used herein, “human” antibodies include antibodies having the amino acid sequence of a human immunoglobulin and include antibodies isolated from human immunoglobulin libraries or from animals transgenic for one or more human immunoglobulin and that do not express endogenous immunoglobulins, as described infra and, for example in, U.S. Pat. No. 5,939,598 by Kucherlapati et al.

[0315] The antibodies of the present invention may be monospecific, bispecific, trispecific or of greater multispecificity. Multispecific antibodies may be specific for different epitopes of a polypeptide of the present invention or may be specific for both a polypeptide of the present invention as well as for a heterologous epitope, such as a heterologous polypeptide or solid support material. See, e.g., PCT publications WO 93/17715; WO 92/08802; WO 91/00360; WO 92/05793; Tutt, et al., J. Immunol. 147:60-69 (1991); U.S. Pat. Nos. 4,474,893; 4,714,681; 4,925,648; 5,573,920; 5,601,819; Kostelny et al., J. Immunol. 148:1547-1553 (1992).

[0316] Antibodies of the present invention may be described or specified in terms of the epitope(s) or portion(s) of a polypeptide of the present invention which they recognize or specifically bind. The epitope(s) or polypeptide portion(s) may be specified as described herein, e.g., by N-terminal and C-terminal positions, or by size in contiguous amino acid residues, or listed in the Tables and Figures. Preferred epitopes of the invention include the predicted epitopes shown in column 7 of Table 1B.1, as well as polynucleotides that encode these epitopes. Antibodies which specifically bind any epitope or polypeptide of the present invention may also be excluded. Therefore, the present invention includes antibodies that specifically bind polypeptides of the present invention, and allows for the exclusion of the same.

[0317] Antibodies of the present invention may also be described or specified in terms of their cross-reactivity. Antibodies that do not bind any other analog, ortholog, or homolog of a polypeptide of the present invention are included. Antibodies that bind polypeptides with at least 95%, at least 90%, at least 85%, at least 80%, at least 75%, at least 70%, at least 65%, at least 60%, at least 55%, and at least 50% identity (as calculated using methods known in the art and described herein) to a polypeptide of the present invention are also included in the present invention. In specific embodiments, antibodies of the present invention cross-react with murine, rat and/or rabbit homologs of human proteins and the corresponding epitopes thereof. Antibodies that do not bind polypeptides with less than 95%, less than 90%, less than 85%, less than 80%, less than 75%, less than 70%, less than 65%, less than 60%, less than 55%, and less than 50% identity (as calculated using methods known in the art and described herein) to a polypeptide of the present invention are also included in the present invention. In a specific embodiment, the above-described cross-reactivity is with respect to any single specific antigenic or immunogenic polypeptide, or combination(s) of 2, 3, 4, 5, or more of the specific antigenic and/or immunogenic polypeptides disclosed herein. Further included in the present invention are antibodies which bind polypeptides encoded by polynucleotides which hybridize to a polynucleotide of the present invention under stringent hybridization conditions (as described herein). Antibodies of the present invention may also be described or specified in terms of their binding affinity to a polypeptide of the invention. Preferred binding affinities include those with a dissociation constant or Kd less than 5×10⁻² M, 10⁻² M, 5×10⁻³ M, 10⁻³ M, 5×10⁻⁴ M, 10⁻⁴ M, 5×10⁻⁵ M, 10⁻⁵ M, 5×10⁻⁶ M, 10⁻⁶M, 5×10⁻⁷ M, 10⁷ M, 5×10⁻⁸ M, 10⁻⁸ M, 5×10⁻⁹ M, 10⁻⁹ M, 5×10⁻¹⁰ M, 10⁻¹⁰ M, 5×10⁻¹¹ M, 10⁻¹¹ M, 5×10⁻¹² M, 10⁻¹² M, 5×10⁻¹³ M, 10⁻¹³ M, 5×10⁻¹⁴ M, 10⁻¹⁴ M, 5×10¹⁵ M, 10⁻¹⁵ M, or 10⁻¹⁵ M.

[0318] The invention also provides antibodies that competitively inhibit binding of an antibody to an epitope of the invention as determined by any method known in the art for determining competitive binding, for example, the immunoassays described herein. In preferred embodiments, the antibody competitively inhibits binding to the epitope by at least 95%, at least 90%, at least 85%, at least 80%, at least 75%, at least 70%, at least 60%, or at least 50%.

[0319] Antibodies of the present invention may act as agonists or antagonists of the polypeptides of the present invention. For example, the present invention includes antibodies which disrupt the receptor/ligand interactions with the polypeptides of the invention either partially or fully. Preferably, antibodies of the present invention bind an antigenic epitope disclosed herein, or a portion thereof. The invention features both receptor-specific antibodies and ligand-specific antibodies. The invention also features receptor-specific antibodies which do not prevent ligand binding but prevent receptor activation. Receptor activation (i.e., signaling) may be determined by techniques described herein or otherwise known in the art. For example, receptor activation can be determined by detecting the phosphorylation (e.g., tyrosine or serine/threonine) of the receptor or its substrate by immunoprecipitation followed by western blot analysis (for example, as described supra). In specific embodiments, antibodies are provided that inhibit ligand activity or receptor activity by at least 95%, at least 90%, at least 85%, at least 80%, at least 75%, at least 70%, at least 60%, or at least 50% of the activity in absence of the antibody.

[0320] The invention also features receptor-specific antibodies which both prevent ligand binding and receptor activation as well as antibodies that recognize the receptor-ligand complex, and, preferably, do not specifically recognize the unbound receptor or the unbound ligand. Likewise, included in the invention are neutralizing antibodies which bind the ligand and prevent binding of the ligand to the receptor, as well as antibodies which bind the ligand, thereby preventing receptor activation, but do not prevent the ligand from binding the receptor. Further included in the invention are antibodies which activate the receptor. These antibodies may act as receptor agonists, i.e., potentiate or activate either all or a subset of the biological activities of the ligand-mediated receptor activation, for example, by inducing dimerization of the receptor. The antibodies may be specified as agonists, antagonists or inverse agonists for biological activities comprising the specific biological activities of the peptides of the invention disclosed herein. The above antibody agonists can be made using methods known in the art. See, e.g., PCT publication WO 96/40281; U.S. Pat. No. 5,811,097; Deng et al., Blood 92(6):1981-1988 (1998); Chen et al., Cancer Res. 58(16):3668-3678 (1998); Harrop et al., J. Immunol. 161(4):1786-1794 (1998); Zhu et al., Cancer Res. 58(15):3209-3214 (1998); Yoon et al., J. Immunol. 160(7):3170-3179 (1998); Prat et al., J. Cell. Sci. 111(Pt2):237-247 (1998); Pitard et al., J. Immunol. Methods 205(2):177-190 (1997); Liautard et al., Cytokine 9(4):233-241 (1997); Carlson et al., J. Biol. Chem. 272(17):11295-11301 (1997); Taryman et al., Neuron 14(4):755-762 (1995); Muller et al., Structure 6(9):1153-1167 (1998); Bartunek et al., Cytokine 8(1):14-20 (1996) (which are all incorporated by reference herein in their entireties).

[0321] Antibodies of the present invention may be used, for example, to purify, detect, and target the polypeptides of the present invention, including both in vitro and in vivo diagnostic and therapeutic methods. For example, the antibodies have utility in immunoassays for qualitatively and quantitatively measuring levels of the polypeptides of the present invention in biological samples. See, e.g., Harlow et al., Antibodies: A Laboratory Manual, (Cold Spring Harbor Laboratory Press, 2nd ed. 1988); incorporated by reference herein in its entirety.

[0322] As discussed in more detail below, the antibodies of the present invention may be used either alone or in combination with other compositions. The antibodies may further be recombinantly fused to a heterologous polypeptide at the N— or C-terminus or chemically conjugated (including covalent and non-covalent conjugations) to polypeptides or other compositions. For example, antibodies of the present invention may be recombinantly fused or conjugated to molecules useful as labels in detection assays and effector molecules such as heterologous polypeptides, drugs, radionuclides, or toxins. See, e.g., PCT publications WO 92/08495; WO 91/14438; WO 89/12624; U.S. Pat. No. 5,314,995; and EP 396,387; the disclosures of which are incorporated herein by reference in their entireties.

[0323] The antibodies of the invention include derivatives that are modified, i.e, by the covalent attachment of any type of molecule to the antibody such that covalent attachment does not prevent the antibody from generating an anti-idiotypic response. For example, but not by way of limitation, the antibody derivatives include antibodies that have been modified, e.g., by glycosylation, acetylation, pegylation, phosphylation, amidation, derivatization by known protecting/blocking groups, proteolytic cleavage, linkage to a cellular ligand or other protein, etc. Any of numerous chemical modifications may be carried out by known techniques, including, but not limited to specific chemical cleavage, acetylation, formylation, metabolic synthesis of tunicamycin, etc. Additionally, the derivative may contain one or more non-classical amino acids.

[0324] The antibodies of the present invention may be generated by any suitable method known in the art. Polyclonal antibodies to an antigen-of-interest can be produced by various procedures well known in the art. For example, a polypeptide of the invention can be administered to various host animals including, but not limited to, rabbits, mice, rats, etc. to induce the production of sera containing polyclonal antibodies specific for the antigen. Various adjuvants may be used to increase the immunological response, depending on the host species, and include but are not limited to, Freund's (complete and incomplete), mineral gels such as aluminum hydroxide, surface active substances such as lysolecithin, pluronic polyols, polyanions, peptides, oil emulsions, keyhole limpet hemocyanins, dinitrophenol, and potentially useful human adjuvants such as BCG (bacille Calmette-Guerin) and corynebacterium parvum. Such adjuvants are also well known in the art.

[0325] Monoclonal antibodies can be prepared using a wide variety of techniques known in the art including the use of hybridoma, recombinant, and phage display technologies, or a combination thereof. For example, monoclonal antibodies can be produced using hybridoma techniques including those known in the art and taught, for example, in Harlow et al., Antibodies: A Laboratory Manual, (Cold Spring Harbor Laboratory Press, 2nd ed. 1988); Hammerling, et al., in: Monoclonal Antibodies and T-Cell Hybridomas 563-681 (Elsevier, N.Y., 1981) (said references incorporated by reference in their entireties). The term “monoclonal antibody” as used herein is not limited to antibodies produced through hybridoma technology. The term “monoclonal antibody” refers to an antibody that is derived from a single clone, including any eukaryotic, prokaryotic, or phage clone, and not the method by which it is produced.

[0326] Methods for producing and screening for specific antibodies using hybridoma technology are routine and well known in the art and are discussed in detail in the Examples. In a non-limiting example, mice can be immunized with a polypeptide of the invention or a cell expressing such peptide. Once an immune response is detected, e.g., antibodies specific for the antigen are detected in the mouse serum, the mouse spleen is harvested and splenocytes isolated. The splenocytes are then fused by well known techniques to any suitable myeloma cells, for example cells from cell line SP20 available from the ATCC. Hybridomas are selected and cloned by limited dilution. The hybridoma clones are then assayed by methods known in the art for cells that secrete antibodies capable of binding a polypeptide of the invention. Ascites fluid, which generally contains high levels of antibodies, can be generated by immunizing mice with positive hybridoma clones.

[0327] Accordingly, the present invention provides methods of generating monoclonal antibodies as well as antibodies produced by the method comprising culturing a hybridoma cell secreting an antibody of the invention wherein, preferably, the hybridoma is generated by fusing splenocytes isolated from a mouse immunized with an antigen of the invention with myeloma cells and then screening the hybridomas resulting from the fusion for hybridoma clones that secrete an antibody able to bind a polypeptide of the invention.

[0328] Another well known method for producing both polyclonal and monoclonal human B cell lines is transformation using Epstein Barr Virus (EBV). Protocols for generating EBV-transformed B cell lines are commonly known in the art, such as, for example, the protocol outlined in Chapter 7.22 of Current Protocols in Immunology, Coligan et al., Eds., 1994, John Wiley & Sons, N.Y., which is hereby incorporated in its entirety by reference. The source of B cells for transformation is commonly human peripheral blood, but B cells for transformation may also be derived from other sources including, but not limited to, lymph nodes, tonsil, spleen, tumor tissue, and infected tissues. Tissues are generally made into single cell suspensions prior to EBV transformation. Additionally, steps may be taken to either physically remove or inactivate T cells (e.g., by treatment with cyclosporin A) in B cell-containing samples, because T cells from individuals seropositive for anti-EBV antibodies can suppress B cell immortalization by EBV.

[0329] In general, the sample containing human B cells is innoculated with EBV, and cultured for 3-4 weeks. A typical source of EBV is the culture supernatant of the B95-8 cell line (ATCC #VR-1492). Physical signs of EBV transformation can generally be seen towards the end of the 3-4 week culture period. By phase-contrast microscopy, transformed cells may appear large, clear, hairy and tend to aggregate in tight clusters of cells. Initially, EBV lines are generally polyclonal. However, over prolonged periods of cell cultures, EBV lines may become monoclonal or polyclonal as a result of the selective outgrowth of particular B cell clones. Alternatively, polyclonal EBV transformed lines may be subcloned (e.g., by limiting dilution culture) or fused with a suitable fusion partner and plated at limiting dilution to obtain monoclonal B cell lines. Suitable fusion partners for EBV transformed cell lines include mouse myeloma cell lines (e.g., SP2/0, X63-Ag8.653), heteromyeloma cell lines (human x mouse; e.g, SPAM-8, SBC-H20, and CB-F7), and human cell lines (e.g., GM 1500, SKO-007, RPMI 8226, and KR4). Thus, the present invention also provides a method of generating polyclonal or monoclonal human antibodies against polypeptides of the invention or fragments thereof, comprising EBV-transformation of human B cells.

[0330] Antibody fragments which recognize specific epitopes may be generated by known techniques. For example, Fab and F(ab′)2 fragments of the invention may be produced by proteolytic cleavage of immunoglobulin molecules, using enzymes such as papain (to produce Fab fragments) or pepsin (to produce F(ab′)2 fragments). F(ab′)2 fragments contain the variable region, the light chain constant region and the CH1 domain of the heavy chain.

[0331] For example, the antibodies of the present invention can also be generated using various phage display methods known in the art. In phage display methods, functional antibody domains are displayed on the surface of phage particles which carry the polynucleotide sequences encoding them. In a particular embodiment, such phage can be utilized to display antigen binding domains expressed from a repertoire or combinatorial antibody library (e.g., human or murine). Phage expressing an antigen binding domain that binds the antigen of interest can be selected or identified with antigen, e.g., using labeled antigen or antigen bound or captured to a solid surface or bead. Phage used in these methods are typically filamentous phage including fd and M13 binding domains expressed from phage with Fab, Fv or disulfide stabilized Fv antibody domains recombinantly fused to either the phage gene III or gene VIII protein. Examples of phage display methods that can be used to make the antibodies of the present invention include those disclosed in Brinkman et al., J. Immunol. Methods 182:41-50 (1995); Ames et al., J. Immunol. Methods 184:177-186 (1995); Kettleborough et al., Eur. J. Immunol. 24:952-958 (1994); Persic et al., Gene 187 9-18 (1997); Burton et al., Advances in Immunology 57:191-280 (1994); PCT application No. PCT/GB91/01134; PCT publications WO 90/02809; WO 91/10737; WO 92/01047; WO 92/18619; WO 93/11236; WO 95/15982; WO 95/20401; and U.S. Pat. Nos. 5,698,426; 5,223,409; 5,403,484; 5,580,717; 5,427,908; 5,750,753; 5,821,047; 5,571,698; 5,427,908; 5,516,637; 5,780,225; 5,658,727; 5,733,743 and 5,969,108; each of which is incorporated herein by reference in its entirety.

[0332] As described in the above references, after phage selection, the antibody coding regions from the phage can be isolated and used to generate whole antibodies, including human antibodies, or any other desired antigen binding fragment, and expressed in any desired host, including mammalian cells, insect cells, plant cells, yeast, and bacteria, e.g., as described in detail below. For example, techniques to recombinantly produce Fab, Fab′ and F(ab′)2 fragments can also be employed using methods known in the art such as those disclosed in PCT publication WO 92/22324; Mullinax et al., BioTechniques 12(6):864-869 (1992); and Sawai et al., AJRI 34:26-34 (1995); and Better et al., Science 240:1041-1043 (1988) (said references incorporated by reference in their entireties).

[0333] Examples of techniques which can be used to produce single-chain Fvs and antibodies include those described in U.S. Pat. Nos. 4,946,778 and 5,258,498; Huston et al., Methods in Enzymology 203:46-88 (1991); Shu et al., PNAS 90:7995-7999 (1993); and Skerra et al., Science 240:1038-1040 (1988). For some uses, including in vivo use of antibodies in humans and in vitro detection assays, it may be preferable to use chimeric, humanized, or human antibodies. A chimeric antibody is a molecule in which different portions of the antibody are derived from different animal species, such as antibodies having a variable region derived from a murine monoclonal antibody and a human immunoglobulin constant region. Methods for producing chimeric antibodies are known in the art. See e.g., Morrison, Science 229:1202 (1985); Oi et al., BioTechniques 4:214 (1986); Gillies et al., (1989) J. Immunol. Methods 125:191-202; U.S. Pat. Nos. 5,807,715; 4,816,567; and 4,816397, which are incorporated herein by reference in their entirety. Humanized antibodies are antibody molecules from non-human species antibody that binds the desired antigen having one or more complementarity determining regions (CDRs) from the non-human species and a framework regions from a human immunoglobulin molecule. Often, framework residues in the human framework regions will be substituted with the corresponding residue from the CDR donor antibody to alter, preferably improve, antigen binding. These framework substitutions are identified by methods well known in the art, e.g., by modeling of the interactions of the CDR and framework residues to identify framework residues important for antigen binding and sequence comparison to identify unusual framework residues at particular positions. (See, e.g., Queen et al., U.S. Pat. No. 5,585,089; Riechmann et al., Nature 332:323 (1988), which are incorporated herein by reference in their entireties.) Antibodies can be humanized using a variety of techniques known in the art including, for example, CDR-grafting (EP 239,400; PCT publication WO 91/09967; U.S. Pat. Nos. 5,225,539; 5,530,101; and 5,585,089), veneering or resurfacing (EP 592,106; EP 519,596; Padlan, Molecular Immunology 28(4/5):489498 (1991); Studnicka et al., Protein Engineering 7(6):805-814 (1994); Roguska. et al., PNAS 91:969-973 (1994)), and chain shuffling (U.S. Pat. No. 5,565,332).

[0334] Completely human antibodies are particularly desirable for therapeutic treatment of human patients. Human antibodies can be made by a variety of methods known in the art including phage display methods described above using antibody libraries derived from human immunoglobulin sequences. See also, U.S. Pat. Nos. 4,444,887 and 4,716,111; and PCT publications WO 98/46645, WO 98/50433, WO 98/24893, WO 98/16654, WO 96/34096, WO 96/33735, and WO 91/10741; each of which is incorporated herein by reference in its entirety.

[0335] Human antibodies can also be produced using transgenic mice which are incapable of expressing functional endogenous immunoglobulins, but which can express human immunoglobulin genes. For example, the human heavy and light chain immunoglobulin gene complexes may be introduced randomly or by homologous recombination into mouse embryonic stem cells. Alternatively, the human variable region, constant region, and diversity region may be introduced into mouse embryonic stem cells in addition to the human heavy and light chain genes. The mouse heavy and light chain immunoglobulin genes may be rendered non-functional separately or simultaneously with the introduction of human immunoglobulin loci by homologous recombination. In particular, homozygous deletion of the JH region prevents endogenous antibody production. The modified embryonic stem cells are expanded and microinjected into blastocysts to produce chimeric mice. The chimeric mice are then bred to produce homozygous offspring which express human antibodies. The transgenic mice are immunized in the normal fashion with a selected antigen, e.g., all or a portion of a polypeptide of the invention. Monoclonal antibodies directed against the antigen can be obtained from the immunized, transgenic mice using conventional hybridoma technology. The human immunoglobulin transgenes harbored by the transgenic mice rearrange during B cell differentiation, and subsequently undergo class switching and somatic mutation. Thus, using such a technique, it is possible to produce therapeutically useful IgG, IgA, IgM and IgE antibodies. For an overview of this technology for producing human antibodies, see Lonberg and Huszar, Int. Rev. inmunol. 13:65-93 (1995). For a detailed discussion of this technology for producing human antibodies and human monoclonal antibodies and protocols for producing such antibodies, see, e.g., PCT publications WO 98/24893; WO 92/01047; WO 96/34096; WO 96/33735; European Patent No. 0 598 877; U.S. Pat. Nos. 5,413,923; 5,625,126; 5,633,425; 5,569,825; 5,661,016; 5,545,806; 5,814,318; 5,885,793; 5,916,771; 5,939,598; 6,075,181; and 6,114,598, which are incorporated by reference herein in their entirety. In addition, companies such as Abgenix, Inc. (Freemont, Calif.) and Genpharm (San Jose, Calif.) can be engaged to provide human antibodies directed against a selected antigen using technology similar to that described above.

[0336] Completely human antibodies which recognize a selected epitope can be generated using a technique referred to as “guided selection.” In this approach a selected non-human monoclonal antibody, e.g., a mouse antibody, is used to guide the selection of a completely human antibody recognizing the same epitope. (Jespers et al., Bio/technology 12:899-903 (1988)).

[0337] Further, antibodies to the polypeptides of the invention can, in turn, be utilized to generate anti-idiotype antibodies that “mimic” polypeptides of the invention using techniques well known to those skilled in the art. (See, e.g., Greenspan & Bona, FASEB J. 7(5):437444; (1989) and Nissinoff, J. Immunol. 147(8):2429-2438 (1991)). For example, antibodies which bind to and competitively inhibit polypeptide multimerization and/or binding of a polypeptide of the invention to a ligand can be used to generate anti-idiotypes that “mimic” the polypeptide multimerization and/or binding domain and, as a consequence, bind to and neutralize polypeptide and/or its ligand. Such neutralizing anti-idiotypes or Fab fragments of such anti-idiotypes can be used in therapeutic regimens to neutralize polypeptide ligand(s)/receptor(s). For example, such anti-idiotypic antibodies can be used to bind a polypeptide of the invention and/or to bind its ligand(s)/receptor(s), and thereby block its biological activity. Alternatively, antibodies which bind to and enhance polypeptide multimerization and/or binding, and/or receptor/ligand multimerization, binding and/or signaling can be used to generate anti-idiotypes that function as agonists of a polypeptide of the invention and/or its ligand/receptor. Such agonistic anti-idiotypes or Fab fragments of such anti-idiotypes can be used in therapeutic regimens as agonists of the polypeptides of the invention or its ligand(s)/receptor(s). For example, such anti-idiotypic antibodies can be used to bind a polypeptide of the invention and/or to bind its ligand(s)/receptor(s), and thereby promote or enhance its biological activity.

[0338] Intrabodies of the invention can be produced using methods known in the art, such as those disclosed and reviewed in Chen et al., Hum. Gene Ther. 5:595-601 (1994); Marasco, W. A., Gene Ther. 4:11-15 (1997); Rondon and Marasco, Annu. Rev. Microbiol. 51:257-283 (1997); Proba et al., J. Mol. Biol. 275:245-253 (1998); Cohen et al., Oncogene 17:2445-2456 (1998); Ohage and Steipe, J. Mol. Biol. 291:1119-1128 (1999); Ohage et al., J. Mol. Biol. 291:1129-1134 (1999); Wirtz and Steipe, Protein Sci. 8:2245-2250 (1999); Zhu et al., J. Immunol. Methods 231:207-222 (1999); and references cited therein.

[0339] Polynucleotides Encoding Antibodies

[0340] The invention further provides polynucleotides comprising a nucleotide sequence encoding an antibody of the invention and fragments thereof. The invention also encompasses polynucleotides that hybridize under stringent or alternatively, under lower stringency hybridization conditions, e.g., as defined supra, to polynucleotides that encode an antibody, preferably, that specifically binds to a polypeptide of the invention, preferably, an antibody that binds to a polypeptide having the amino acid sequence of SEQ ID NO:Y, to a polypeptide encoded by a portion of SEQ ID NO:X as defined in columns 8 and 9 of Table 2, and/or to a polypeptide encoded by the cDNA contained in ATCC Deposit No:Z.

[0341] The polynucleotides may be obtained, and the nucleotide sequence of the polynucleotides determined, by any method known in the art. For example, if the nucleotide sequence of the antibody is known, a polynucleotide encoding the antibody may be assembled from chemically synthesized oligonucleotides (e.g., as described in Kutmeier et al., BioTechniques 17:242 (1994)), which, briefly, involves the synthesis of overlapping oligonucleotides containing portions of the sequence encoding the antibody, annealing and ligating of those oligonucleotides, and then amplification of the ligated oligonucleotides by PCR.

[0342] Alternatively, a polynucleotide encoding an antibody may be generated from nucleic acid from a suitable source. If a clone containing a nucleic acid encoding a particular antibody is not available, but the sequence of the antibody molecule is known, a nucleic acid encoding the immunoglobulin may be chemically synthesized or obtained from a suitable source (e.g., an antibody cDNA library, or a cDNA library generated from, or nucleic acid, preferably poly A+ RNA, isolated from, any tissue or cells expressing the antibody, such as hybridoma cells selected to express an antibody of the invention) by PCR amplification using synthetic primers hybridizable to the 3′ and 5′ ends of the sequence or by cloning using an oligonucleotide probe specific for the particular gene sequence to identify, e.g., a cDNA clone from a cDNA library that encodes the antibody. Amplified nucleic acids generated by PCR may then be cloned into replicable cloning vectors using any method well known in the art.

[0343] Once the nucleotide sequence and corresponding amino acid sequence of the antibody is determined, the nucleotide sequence of the antibody may be manipulated using methods well known in the art for the manipulation of nucleotide sequences, e.g., recombinant DNA techniques, site directed mutagenesis, PCR, etc. (see, for example, the techniques described in Sambrook et al., 1990, Molecular Cloning, A Laboratory Manual, 2d Ed., Cold Spring Harbor Laboratory, Cold Spring Harbor, N.Y. and Ausubel et al., eds., 1998, Current Protocols in Molecular Biology, John Wiley & Sons, NY, which are both incorporated by reference herein in their entireties ), to generate antibodies having a different amino acid sequence, for example to create amino acid substitutions, deletions, and/or insertions.

[0344] In a specific embodiment, the amino acid sequence of the heavy and/or light chain variable domains may be inspected to identify the sequences of the complementarity determining regions (CDRs) by methods that are well know in the art, e.g., by comparison to known amino acid sequences of other heavy and light chain variable regions to determine the regions of sequence hypervariability. Using routine recombinant DNA techniques, one or more of the CDRs may be inserted within framework regions, e.g., into human framework regions to humanize a non-human antibody, as described supra. The framework regions may be naturally occurring or consensus framework regions, and preferably human framework regions (see, e.g., Chothia et al., J. Mol. Biol. 278: 457479 (1998) for a listing of human framework regions). Preferably, the polynucleotide generated by the combination of the framework regions and CDRs encodes an antibody that specifically binds a polypeptide of the invention. Preferably, as discussed supra, one or more amino acid substitutions may be made within the framework regions, and, preferably, the amino acid substitutions improve binding of the antibody to its antigen. Additionally, such methods may be used to make amino acid substitutions or deletions of one or more variable region cysteine residues participating in an intrachain disulfide bond to generate antibody molecules lacking one or more intrachain disulfide bonds. Other alterations to the polynucleotide are encompassed by the present invention and within the skill of the art.

[0345] In addition, techniques developed for the production of “chimeric antibodies” (Morrison et al., Proc. Natl. Acad. Sci. 81:851-855 (1984); Neuberger et al., Nature 312:604-608 (1984); Takeda et al., Nature 314:452454 (1985)) by splicing genes from a mouse antibody molecule of appropriate antigen specificity together with genes from a human antibody molecule of appropriate biological activity can be used. As described supra, a chimeric antibody is a molecule in which different portions are derived from different animal species, such as those having a variable region derived from a murine mAb and a human immunoglobulin constant region, e.g., humanized antibodies.

[0346] Alternatively, techniques described for the production of single chain antibodies (U.S. Pat. No. 4,946,778; Bird, Science 242:423-42 (1988); Huston et al., Proc. Natl. Acad. Sci. USA 85:5879-5883 (1988); and Ward et al., Nature 334:544-54 (1989)) can be adapted to produce single chain antibodies. Single chain antibodies are formed by linking the heavy and light chain fragments of the Fv region via an amino acid bridge, resulting in a single chain polypeptide. Techniques for the assembly of functional Fv fragments in E. coli may also be used (Skerra et al., Science242:1038-1041 (1988)).

[0347] Methods of Producing Antibodies

[0348] The antibodies of the invention can be produced by any method known in the art for the synthesis of antibodies, in particular, by chemical synthesis or preferably, by recombinant expression techniques. Methods of producing antibodies include, but are not limited to, hybridoma technology, EBV transformation, and other methods discussed herein as well as through the use recombinant DNA technology, as discussed below.

[0349] Recombinant expression of an antibody of the invention, or fragment, derivative or analog thereof, (e.g., a heavy or light chain of an antibody of the invention or a single chain antibody of the invention), requires construction of an expression vector containing a polynucleotide that encodes the antibody. Once a polynucleotide encoding an antibody molecule or a heavy or light chain of an antibody, or portion thereof (preferably containing the heavy or light chain variable domain), of the invention has been obtained, the vector for the production of the antibody molecule may be produced by recombinant DNA technology using techniques well known in the art. Thus, methods for preparing a protein by expressing a polynucleotide containing an antibody encoding nucleotide sequence are described herein. Methods which are well known to those skilled in the art can be used to construct expression vectors containing antibody coding sequences and appropriate transcriptional and translational control signals. These methods include, for example, in vitro recombinant DNA techniques, synthetic techniques, and in vivo genetic recombination. The invention, thus, provides replicable vectors comprising a nucleotide sequence encoding an antibody molecule of the invention, or a heavy or light chain thereof, or a heavy or light chain variable domain, operably linked to a promoter. Such vectors may include the nucleotide sequence encoding the constant region of the antibody molecule (see, e.g., PCT Publication WO 86/05807; PCT Publication WO 89/01036; and U.S. Pat. No. 5,122,464) and the variable domain of the antibody may be cloned into such a vector for expression of the entire heavy or light chain.

[0350] The expression vector is transferred to a host cell by conventional techniques and the transfected cells are then cultured by conventional techniques to produce an antibody of the invention. Thus, the invention includes host cells containing a polynucleotide encoding an antibody of the invention, or a heavy or light chain thereof, or a single chain antibody of the invention, operably linked to a heterologous promoter. In preferred embodiments for the expression of double-chained antibodies, vectors encoding both the heavy and light chains may be co-expressed in the host cell for expression of the entire immunoglobulin molecule, as detailed below.

[0351] A variety of host-expression vector systems may be utilized to express the antibody molecules of the invention. Such host-expression systems represent vehicles by which the coding sequences of interest may be produced and subsequently purified, but also represent cells which may, when transformed or transfected with the appropriate nucleotide coding sequences, express an antibody molecule of the invention in situ. These include but are not limited to microorganisms such as bacteria (e.g., E. coli, B. subtilis) transformed with recombinant bacteriophage DNA, plasmid DNA or cosmid DNA expression vectors containing antibody coding sequences; yeast (e.g., Saccharomyces, Pichia) transformed with recombinant yeast expression vectors containing antibody coding sequences; insect cell systems infected with recombinant virus expression vectors (e.g., baculovirus) containing antibody coding sequences; plant cell systems infected with recombinant virus expression vectors (e.g., cauliflower mosaic virus, CaMV; tobacco mosaic virus, TMV) or transformed with recombinant plasmid expression vectors (e.g., Ti plasmid) containing antibody coding sequences; or mammalian cell systems (e.g., COS, CHO, BHK, 293, 3T3 cells) harboring recombinant expression constructs containing promoters derived from the genome of mammalian cells (e.g., metallothionein promoter) or from mammalian viruses (e.g., the adenovirus late promoter; the vaccinia virus 7.5K promoter). Preferably, bacterial cells such as Escherichia coli, and more preferably, eukaryotic cells, especially for the expression of whole recombinant antibody molecule, are used for the expression of a recombinant antibody molecule. For example, mammalian cells such as Chinese hamster ovary cells (CHO), in conjunction with a vector such as the major intermediate early gene promoter element from human cytomegalovirus is an effective expression system for antibodies (Foecking et al., Gene 45:101 (1986); Cockett et al., Bio/Technology 8:2 (1990)).

[0352] In bacterial systems, a number of expression vectors may be advantageously selected depending upon the use intended for the antibody molecule being expressed. For example, when a large quantity of such a protein is to be produced, for the generation of pharmaceutical compositions of an antibody molecule, vectors which direct the expression of high levels of fusion protein products that are readily purified may be desirable. Such vectors include, but are not limited, to the E. coli expression vector pUR278 (Ruther et al., EMBO J. 2:1791 (1983)), in which the antibody coding sequence may be ligated individually into the vector in frame with the lac Z coding region so that a fusion protein is produced; pIN vectors (Inouye & Inouye, Nucleic Acids Res. 13:3101-3109 (1985); Van Heeke & Schuster, J. Biol. Chem. 24:5503-5509 (1989)); and the like. pGEX vectors may also be used to express foreign polypeptides as fusion proteins with glutathione S-transferase (GST). In general, such fusion proteins are soluble and can easily be purified from lysed cells by adsorption and binding to matrix glutathione-agarose beads followed by elution in the presence of free glutathione. The pGEX vectors are designed to include thrombin or factor Xa protease cleavage sites so that the cloned target gene product can be released from the GST moiety.

[0353] In an insect system, Autographa californica nuclear polyhedrosis virus (AcNPV) is used as a vector to express foreign genes. The virus grows in Spodoptera frugiperda cells. The antibody coding sequence may be cloned individually into non-essential regions (for example the polyhedrin gene) of the virus and placed under control of an AcNPV promoter (for example the polyhedrin promoter).

[0354] In mammalian host cells, a number of viral-based expression systems may be utilized. In cases where an adenovirus is used as an expression vector, the antibody coding sequence of interest may be ligated to an adenovirus transcription/translation control complex, e.g., the late promoter and tripartite leader sequence. This chimeric gene may then be inserted in the adenovirus genome by in vitro or in vivo recombination. Insertion in a non-essential region of the viral genome (e.g., region E1 or E3) will result in a recombinant virus that is viable and capable of expressing the antibody molecule in infected hosts. (e.g., see Logan & Shenk, Proc. Natl. Acad. Sci. USA 81:355-359 (1984)). Specific initiation signals may also be required for efficient translation of inserted antibody coding sequences. These signals include the ATG initiation codon and adjacent sequences. Furthermore, the initiation codon must be in phase with the reading frame of the desired coding sequence to ensure translation of the entire insert. These exogenous translational control signals and initiation codons can be of a variety of origins, both natural and synthetic. The efficiency of expression may be enhanced by the inclusion of appropriate transcription enhancer elements, transcription terminators, etc. (see Bittner et al., Methods in Enzymol. 153:51-544 (1987)).

[0355] In addition, a host cell strain may be chosen which modulates the expression of the inserted sequences, or modifies and processes the gene product in the specific fashion desired. Such modifications (e.g., glycosylation) and processing (e.g., cleavage) of protein products may be important for the function of the protein. Different host cells have characteristic and specific mechanisms for the post-translational processing and modification of proteins and gene products. Appropriate cell lines or host systems can be chosen to ensure the correct modification and processing of the foreign protein expressed. To this end, eukaryotic host cells which possess the cellular machinery for proper processing of the primary transcript, glycosylation, and phosphorylation of the gene product may be used. Such mammalian host cells include but are not limited to CHO, VERY, BHK, Hela, COS, MDCK, 293, 3T3, W138, and in particular, breast cancer cell lines such as, for example, BT483, Hs578T, HTB2, BT20 and T47D, and normal mammary gland cell line such as, for example, CRL7030 and Hs578Bst.

[0356] For long-term, high-yield production of recombinant proteins, stable expression is preferred. For example, cell lines which stably express the antibody molecule may be engineered. Rather than using expression vectors which contain viral origins of replication, host cells can be transformed with DNA controlled by appropriate expression control elements (e.g., promoter, enhancer, sequences, transcription terminators, polyadenylation sites, etc.), and a selectable marker. Following the introduction of the foreign DNA, engineered cells may be allowed to grow for 1-2 days in an enriched media, and then are switched to a selective media. The selectable marker in the recombinant plasmid confers resistance to the selection and allows cells to stably integrate the plasmid into their chromosomes and grow to form foci which in turn can be cloned and expanded into cell lines. This method may advantageously be used to engineer cell lines which express the antibody molecule. Such engineered cell lines may be particularly useful in screening and evaluation of compounds that interact directly or indirectly with the antibody molecule.

[0357] A number of selection systems may be used, including but not limited to the herpes simplex virus thymidine kinase (Wigler et al., Cell 11:223 (1977)), hypoxanthine-guanine phosphoribosyltransferase (Szybalska & Szybalski, Proc. Natl. Acad. Sci. USA 48:202 (1992)), and adenine phosphoribosyltransferase (Lowy et al., Cell 22:817 (1980)) genes can be employed in tk-, hgprt- or aprt-cells, respectively. Also, antimetabolite resistance can be used as the basis of selection for the following genes: dhfr, which confers resistance to methotrexate (Wigler et al., Natl. Acad. Sci. USA 77:357 (1980); O'Hare et al., Proc. Natl. Acad. Sci. USA 78:1527 (1981)); gpt, which confers resistance to mycophenolic acid (Mulligan & Berg, Proc. Natl. Acad. Sci. USA 78:2072 (1981)); neo, which confers resistance to the aminoglycoside G-418 Clinical Pharmacy 12:488-505; Wu and Wu, Biotherapy 3:87-95 (1991); Tolstoshev, Ann. Rev. Pharmacol. Toxicol. 32:573-596 (1993); Mulligan, Science 260:926-932 (1993); and Morgan and Anderson, Ann. Rev. Biochem. 62:191-217 (1993); May, 1993, TIB TECH 11(5):155-215 (1993)); and hygro, which confers resistance to hygromycin (Santerre et al., Gene 30:147 (1984)). Methods commonly known in the art of recombinant DNA technology may be routinely applied to select the desired recombinant clone, and such methods are described, for example, in Ausubel et al. (eds.), Current Protocols in Molecular Biology, John Wiley & Sons, NY (1993); Kriegler, Gene Transfer and Expression, A Laboratory Manual, Stockton Press, NY (1990); and in Chapters 12 and 13, Dracopoli et al. (eds), Current Protocols in Human Genetics, John Wiley & Sons, NY (1994); Colberre-Garapin et al., J. Mol. Biol. 150:1 (1981), which are incorporated by reference herein in their entireties.

[0358] The expression levels of an antibody molecule can be increased by vector amplification (for a review, see Bebbington and Hentschel, The use of vectors based on gene amplification for the expression of cloned genes in mammalian cells in DNA cloning, Vol.3. (Academic Press, New York, 1987)). When a marker in the vector system expressing antibody is amplifiable, increase in the level of inhibitor present in culture of host cell will increase the number of copies of the marker gene. Since the amplified region is associated with the antibody gene, production of the antibody will also increase (Crouse et al., Mol. Cell. Biol. 3:257 (1983)).

[0359] Vectors which use glutamine synthase (GS) or DHFR as the selectable markers can be amplified in the presence of the drugs methionine sulphoximine or methotrexate, respectively. An advantage of glutamine synthase based vectors are the availabilty of cell lines (e.g., the murine myeloma cell line, NSO) which are glutamine synthase negative. Glutamine synthase expression systems can also function in glutamine synthase expressing cells (e.g. Chinese Hamster Ovary (CHO) cells) by providing additional inhibitor to prevent the functioning of the endogenous gene. A glutamine synthase expression system and components thereof are detailed in PCT publications: WO87/04462; WO86/05807; WO89/01036; WO89/10404; and WO91/06657 which are incorporated in their entireties by reference herein. Additionally, glutamine synthase expression vectors that may be used according to the present invention are commercially available from suplliers, including, for example Lonza Biologics, Inc. (Portsmouth, N.H.). Expression and production of monoclonal antibodies using a GS expression system in murine myeloma cells is described in Bebbington et al., Bio/technology 10:169(1992) and in Biblia and Robinson Biotechnol. Prog. 11:1(1995) which are incorporated in their entirities by reference herein.

[0360] The host cell may be co-transfected with two expression vectors of the invention, the first vector encoding a heavy chain derived polypeptide and the second vector encoding a light chain derived polypeptide. The two vectors may contain identical selectable markers which enable equal expression of heavy and light chain polypeptides. Alternatively, a single vector may be used which encodes, and is capable of expressing, both heavy and light chain polypeptides. In such situations, the light chain should be placed before the heavy chain to avoid an excess of toxic free heavy chain (Proudfoot, Nature 322:52 (1986); Kohler, Proc. Natl. Acad. Sci. USA 77:2197 (1980)). The coding sequences for the heavy and light chains may comprise cDNA or genomic DNA.

[0361] Once an antibody molecule of the invention has been produced by an animal, chemically synthesized, or recombinantly expressed, it may be purified by any method known in the art for purification of an immunoglobulin molecule, for example, by chromatography (e.g., ion exchange, affinity, particularly by affinity for the specific antigen after Protein A, and sizing column chromatography), centrifugation, differential solubility, or by any other standard technique for the purification of proteins. In addition, the antibodies of the present invention or fragments thereof can be fused to heterologous polypeptide sequences described herein or otherwise known in the art, to facilitate purification.

[0362] The present invention encompasses antibodies recombinantly fused or chemically conjugated (including both covalently and non-covalently conjugations) to a polypeptide (or portion thereof, preferably at least 10, 20, 30, 40, 50, 60, 70, 80, 90 or 100 amino acids of the polypeptide) of the present invention to generate fusion proteins. The fusion does not necessarily need to be direct, but may occur through linker sequences. The antibodies may be specific for antigens other than polypeptides (or portion thereof, preferably at least 10, 20, 30, 40, 50, 60, 70, 80, 90 or 100 amino acids of the polypeptide) of the present invention. For example, antibodies may be used to target the polypeptides of the present invention to particular cell types, either in vitro or in vivo, by fusing or conjugating the polypeptides of the present invention to antibodies specific for particular cell surface receptors. Antibodies fused or conjugated to the polypeptides of the present invention may also be used in in vitro immunoassays and purification methods using methods known in the art. See e.g., Harbor et al., supra, and PCT publication WO 93/21232; EP 439,095; Naramura et al., Immunol. Lett. 39:91-99 (1994); U.S. Pat. No. 5,474,981; Gillies et al., PNAS 89:1428-1432 (1992); Fell et al., J. Immunol. 146:2446-2452 (1991), which are incorporated by reference in their entireties.

[0363] The present invention further includes compositions comprising the polypeptides of the present invention fused or conjugated to antibody domains other than the variable regions. For example, the polypeptides of the present invention may be fused or conjugated to an antibody Fe region, or portion thereof. The antibody portion fused to a polypeptide of the present invention may comprise the constant region, hinge region, CH1 domain, CH2 domain, and CH3 domain or any combination of whole domains or portions thereof. The polypeptides may also be fused or conjugated to the above antibody portions to form multimers. For example, Fc portions fused to the polypeptides of the present invention can form dimers through disulfide bonding between the Fc portions. Higher multimeric forms can be made by fusing the polypeptides to portions of IgA and IgM. Methods for fusing or conjugating the polypeptides of the present invention to antibody portions are known in the art. See, e.g., U.S. Pat. Nos. 5,336,603; 5,622,929; 5,359,046; 5,349,053; 5,447,851; 5,112,946; EP 307,434; EP 367,166; PCT publications WO 96/04388; WO 91/06570; Ashkenazi et al., Proc. Natl. Acad. Sci. USA 88:10535-10539 (1991); Zheng et al., J. Immunol. 154:5590-5600 (1995); and Vil et al., Proc. Natl. Acad. Sci. USA 89:11337-11341 (1992) (said references incorporated by reference in their entireties).

[0364] As discussed, supra, the polypeptides corresponding to a polypeptide, polypeptide fragment, or a variant of SEQ ID NO:Y may be fused or conjugated to the above antibody portions to increase the in vivo half life of the polypeptides or for use in immunoassays using methods known in the art. Further, the polypeptides corresponding to SEQ ID NO:Y may be fused or conjugated to the above antibody portions to facilitate purification. One reported example describes chimeric proteins consisting of the first two domains of the human CD4-polypeptide and various domains of the constant regions of the heavy or light chains of mammalian immunoglobulins. See EP 394,827; and Traunecker et al., Nature 331:84-86 (1988). The polypeptides of the present invention fused or conjugated to an antibody having disulfide-linked dimeric structures (due to the IgG) may also be more efficient in binding and neutralizing other molecules, than the monomeric secreted protein or protein fragment alone. See, for example, Fountoulakis et al., J. Biochem. 270:3958-3964 (1995). In many cases, the Fc part in a fusion protein is beneficial in therapy and diagnosis, and thus can result in, for example, improved pharmacokinetic properties. See, for example, EP A 232,262. Alternatively, deleting the Fc part after the fusion protein has been expressed, detected, and purified, would be desired. For example, the Fc portion may hinder therapy and diagnosis if the fusion protein is used as an antigen for immunizations. In drug discovery, for example, human proteins, such as hIL-5, have been fused with Fc portions for the purpose of high-throughput screening assays to identify antagonists of hIL-5. (See, Bennett et al., J. Molecular Recognition 8:52-58 (1995); Johanson et al., J. Biol. Chem. 270:9459-9471 (1995)).

[0365] Moreover, the antibodies or fragments thereof of the present invention can be fused to marker sequences, such as a peptide to facilitate purification. In preferred embodiments, the marker amino acid sequence is a hexa-histidine peptide, such as the tag provided in a pQE vector (QIAGEN, Inc., 9259 Eton Avenue, Chatsworth, Calif., 91311), among others, many of which are commercially available. As described in Gentz et al., Proc. Natl. Acad. Sci. USA 86:821-824 (1989), for instance, hexa-histidine provides for convenient purification of the fusion protein. Other peptide tags useful for purification include, but are not limited to, the “HA” tag, which corresponds to an epitope derived from the influenza hemagglutinin protein (Wilson et al., Cell 37:767 (1984)) and the “flag” tag.

[0366] The present invention further encompasses antibodies or fragments thereof conjugated to a diagnostic or therapeutic agent. The antibodies can be used diagnostically to, for example, monitor the development or progression of a tumor as part of a clinical testing procedure to, e.g., determine the efficacy of a given treatment regimen. Detection can be facilitated by coupling the antibody to a detectable substance. Examples of detectable substances include various enzymes, prosthetic groups, fluorescent materials, luminescent materials, bioluminescent materials, radioactive materials, positron emitting metals using various positron emission tomographies, and nonradioactive paramagnetic metal ions. The detectable substance may be coupled or conjugated either directly to the antibody (or fragment thereof) or indirectly, through an intermediate (such as, for example, a linker known in the art) using techniques known in the art. See, for example, U.S. Pat. No. 4,741,900 for metal ions which can be conjugated to antibodies for use as diagnostics according to the present invention. Examples of suitable enzymes include horseradish peroxidase, alkaline phosphatase, beta-galactosidase, or acetylcholinesterase; examples of suitable prosthetic group complexes include streptavidin/biotin and avidin/biotin; examples of suitable fluorescent materials include umbelliferone, fluorescein, fluorescein isothiocyanate, rhodamine, dichlorotriazinylamine fluorescein, dansyl chloride or phycoerythrin; an example of a luminescent material includes luminol; examples of bioluminescent materials include luciferase, luciferin, and aequorin; and examples of suitable radioactive material include 125I, 131I, 111In or 99Tc.

[0367] Further, an antibody or fragment thereof may be conjugated to a therapeutic moiety such as a cytotoxin, e.g., a cytostatic or cytocidal agent, a therapeutic agent or a radioactive metal ion, e.g., alpha-emitters such as, for example, 213Bi. A cytotoxin or cytotoxic agent includes any agent that is detrimental to cells. Examples include paclitaxol, cytochalasin B, gramicidin D, ethidium bromide, emetine, mitomycin, etoposide, tenoposide, vincristine, vinblastine, colchicin, doxorubicin, daunorubicin, dihydroxy anthracin dione, mitoxantrone, mithramycin, actinomycin D, 1-dehydrotestosterone, glucocorticoids, procaine, tetracaine, lidocaine, propranolol, and puromycin and analogs or homologs thereof. Therapeutic agents include, but are not limited to, antimetabolites (e.g., methotrexate, 6-mercaptopurine, 6-thioguanine, cytarabine, 5-fluorouracil decarbazine), alkylating agents (e.g., mechlorethamine, thioepa chlorambucil, melphalan, carmustine (BSNU) and lomustine (CCNU), cyclothosphamide, busulfan, dibromomannitol, streptozotocin, mitomycin C, and cis-dichlorodiamine platinum (II) (DDP) cisplatin), anthracyclines (e.g., daunorubicin (formerly daunomycin) and doxorubicin), antibiotics (e.g., dactinomycin (formerly actinomycin), bleomycin, mithramycin, and anthramycin (AMC)), and anti-mitotic agents (e.g., vincristine and vinblastine).

[0368] The conjugates of the invention can be used for modifying a given biological response, the therapeutic agent or drug moiety is not to be construed as limited to classical chemical therapeutic agents. For example, the drug moiety may be a protein or polypeptide possessing a desired biological activity. Such proteins may include, for example, a toxin such as abrin, ricin A, pseudomonas exotoxin, or diphtheria toxin; a protein such as tumor necrosis factor, α-interferon, β-interferon, nerve growth factor, platelet derived growth factor, tissue plasminogen activator, an apoptotic agent, e.g., TNF-alpha, TNF-beta, AIM I (See, International Publication No. WO 97/33899), AIM II (See, International Publication No. WO 97/34911), Fas Ligand (Takahashi et al., Int. Immunol., 6:1567-1574 (1994)), VEGI (See, International Publication No. WO 99/23105), a thrombotic agent or an anti-angiogenic agent, e.g., angiostatin or endostatin; or, biological response modifiers such as, for example, lymphokines, interleukin-1 (“IL-1”), interleukin-2 (“IL-2”), interleukin-6 (“IL-6”), granulocyte macrophage colony stimulating factor (“GM-CSF”), granulocyte colony stimulating factor (“G-CSF”), or order growth factors.

[0369] Antibodies may also be attached to solid supports, which are particularly useful for immunoassays or purification of the target antigen. Such solid supports include, but are not limited to, glass, cellulose, polyacrylamide, nylon, polystyrene, polyvinyl chloride or polypropylene.

[0370] Techniques for conjugating such therapeutic moiety to antibodies are well known. See, for example, Arnon et al., “Monoclonal Antibodies For Immunotargeting Of Drugs In Cancer Therapy”, in Monoclonal Antibodies And Cancer Therapy, Reisfeld et al. (eds.), pp. 243-56 (Alan R. Liss, Inc. 1985); Hellstrom et al., “Antibodies For Drug Delivery”, in Controlled Drug Delivery (2nd Ed.), Robinson et al. (eds.), pp. 623-53 (Marcel Dekker, Inc. 1987); Thorpe, “Antibody Carriers Of Cytotoxic Agents In Cancer Therapy: A Review”, in Monoclonal Antibodies '84: Biological And Clinical Applications, Pinchera et al. (eds.), pp. 475-506 (1985); “Analysis, Results, And Future Prospective Of The Therapeutic Use Of Radiolabeled Antibody In Cancer Therapy”, in Monoclonal Antibodies For Cancer Detection And Therapy, Baldwin et al. (eds.), pp. 303-16 (Academnic Press 1985), and Thorpe et al., “The Preparation And Cytotoxic Properties Of Antibody-Toxin Conjugates”, Immunol. Rev. 62:119-58 (1982).

[0371] Alternatively, an antibody can be conjugated to a second antibody to form an antibody heteroconjugate as described by Segal in U.S. Pat. No. 4,676,980, which is incorporated herein by reference in its entirety.

[0372] An antibody, with or without a therapeutic moiety conjugated to it, administered alone or in combination with cytotoxic factor(s) and/or cytokine(s) can be used as a therapeutic.

[0373] Immunophenotyping

[0374] The antibodies of the invention may be utilized for immunophenotyping of cell lines and biological samples. Translation products of the gene of the present invention may be useful as cell-specific markers, or more specifically as cellular markers that are differentially expressed at various stages of differentiation and/or maturation of particular cell types. Monoclonal antibodies directed against a specific epitope, or combination of epitopes, will allow for the screening of cellular populations expressing the marker. Various techniques can be utilized using monoclonal antibodies to screen for cellular populations expressing the marker(s), and include magnetic separation using antibody-coated magnetic beads, “panning” with antibody attached to a solid matrix (i.e., plate), and flow cytometry (See, e.g., U.S. Pat. No. 5,985,660; and Morrison et al., Cell, 96:73749 (1999)).

[0375] These techniques allow for the screening of particular populations of cells, such as might be found with hematological malignancies (i.e. minimal residual disease (MRD) in acute leukemic patients) and “non-self” cells in transplantations to prevent Graft-versus-Host Disease (GVHD). Alternatively, these techniques allow for the screening of hematopoietic stem and progenitor cells capable of undergoing proliferation and/or differentiation, as might be found in human umbilical cord blood.

[0376] Assays For Antibody Binding

[0377] The antibodies of the invention may be assayed for immunospecific binding by any method known in the art. The immunoassays which can be used include but are not limited to competitive and non-competitive assay systems using techniques such as western blots, radioimmunoassays, ELISA (enzyme linked immunosorbent assay), “sandwich” immunoassays, immunoprecipitation assays, precipitin reactions, gel diffusion precipitin reactions, immunodiffusion assays, agglutination assays, complement-fixation assays, immunoradiometric assays, fluorescent immunoassays, and protein A immunoassays, to name but a few. Such assays are routine and well known in the art (see, e.g., Ausubel et al, eds, 1994, Current Protocols in Molecular Biology, Vol. 1, John Wiley & Sons, Inc., New York, which is incorporated by reference herein in its entirety). Exemplary immunoassays are described briefly below (but are not intended by way of limitation).

[0378] Immunoprecipitation protocols generally comprise lysing a population of cells in a lysis buffer such as RIPA buffer (1% NP40 or Triton X-100, 1% sodium deoxycholate, 0.1% SDS, 0.15 M NaCl, 0.01 M sodium phosphate at pH 7.2, 1% Trasylol) supplemented with protein phosphatase and/or protease inhibitors (e.g., EDTA, PMSF, aprotinin, sodium vanadate), adding the antibody of interest to the cell lysate, incubating for a period of time (e.g., 14 hours) at 4° C., adding protein A and/or protein G sepharose beads to the cell lysate, incubating for about an hour or more at 4° C., washing the beads in lysis buffer and resuspending the beads in SDS/sample buffer. The ability of the antibody of interest to immunoprecipitate a particular antigen can be assessed by, e.g., western blot analysis. One of skill in the art would be knowledgeable as to the parameters that can be modified to increase the binding of the antibody to an antigen and decrease the background (e.g., pre-clearing the cell lysate with sepharose beads). For further discussion regarding immunoprecipitation protocols see, e.g., Ausubel et al., eds., (1994), Current Protocols in Molecular Biology, Vol. 1, John Wiley & Sons, Inc., New York, section 10.16.1.

[0379] Western blot analysis generally comprises preparing protein samples, electrophoresis of the protein samples in a polyacrylamide gel (e.g., 8%-20% SDS-PAGE depending on the molecular weight of the antigen), transferring the protein sample from the polyacrylamide gel to a membrane such as nitrocellulose, PVDF or nylon, blocking the membrane in blocking solution (e.g., PBS with 3% BSA or non-fat milk), washing the membrane in washing buffer (e.g., PBS-Tween 20), blocking the membrane with primary antibody (the antibody of interest) diluted in blocking buffer, washing the membrane in washing buffer, blocking the membrane with a secondary antibody (which recognizes the primary antibody, e.g., an anti-human antibody) conjugated to an enzymatic substrate (e.g., horseradish peroxidase or alkaline phosphatase) or radioactive molecule (e.g., 32P or 125I) diluted in blocking buffer, washing the membrane in wash buffer, and detecting the presence of the antigen. One of skill in the art would be knowledgeable as to the parameters that can be modified to increase the signal detected and to reduce the background noise. For further discussion regarding western blot protocols see, e.g., Ausubel et al, eds, (1994), Current Protocols in Molecular Biology, Vol. 1, John Wiley & Sons, Inc., New York, section 10.8.1.

[0380] ELISAs comprise preparing antigen, coating the well of a 96 well microtiter plate with the antigen, adding the antibody of interest conjugated to a detectable compound such as an enzymatic substrate (e.g., horseradish peroxidase or alkaline phosphatase) to the well and incubating for a period of time, and detecting the presence of the antigen. In ELISAs the antibody of interest does not have to be conjugated to a detectable compound; instead, a second antibody (which recognizes the antibody of interest) conjugated to a detectable compound may be added to the well. Further, instead of coating the well with the antigen, the antibody may be coated to the well. In this case, a second antibody conjugated to a detectable compound may be added following the addition of the antigen of interest to the coated well. One of skill in the art would be knowledgeable as to the parameters that can be modified to increase the signal detected as well as other variations of ELISAs known in the art. For further discussion regarding ELISAs see, e.g., Ausubel et al, eds, (1994), Current Protocols in Molecular Biology, Vol. 1, John Wiley & Sons, Inc., New York, section 11.2.1.

[0381] The binding affinity of an antibody to an antigen and the off-rate of an antibody-antigen interaction can be determined by competitive binding assays. One example of a competitive binding assay is a radioimmunoassay comprising the incubation of labeled antigen (e.g., 3H or 125I) with the antibody of interest in the presence of increasing amounts of unlabeled antigen, and the detection of the antibody bound to the labeled antigen. The affinity of the antibody of interest for a particular antigen and the binding off-rates can be determined from the data by scatchard plot analysis. Competition with a second antibody can also be determined using radioimmunoassays. In this case, the antigen is incubated with antibody of interest conjugated to a labeled compound (e.g., 3H or 125I) in the presence of increasing amounts of an unlabeled second antibody.

[0382] Antibodies of the invention may be characterized using immunocytochemisty methods on cells (e.g., mammalian cells, such as CHO cells) transfected with a vector enabling the expression of an antigen or with vector alone using techniques commonly known in the art. Antibodies that bind antigen transfected cells, but not vector-only transfected cells, are antigen specific.

[0383] Therapeutic Uses

[0384] Table 1D also provides information regarding biological activities and preferred therapeutic uses (i.e. see, “Preferred Indications” column) for polynucleotides and polypeptides of the invention (including antibodies, agonists, and/or antagonists thereof). Table 1D also provides information regarding assays which may be used to test polynucleotides and polypeptides of the invention (including antibodies, agonists, and/or antagonists thereof) for the corresponding biological activities. The first column (“Gene No.”) provides the gene number in the application for each clone identifier. The second column (“cDNA ATCC Deposit No:Z”) provides the unique clone identifier for each clone as previously described and indicated in Table 1A, Table 1B, and Table 1C. The third column (“AA SEQ ID NO:Y”) indicates the Sequence Listing SEQ ID Number for polypeptide sequences encoded by the corresponding cDNA clones (also as indicated in Table 1A, Table 1B, and Table 2). The fourth column (“Biological Activity”) indicates a biological activity corresponding to the indicated polypeptides (or polynucleotides encoding said polypeptides). The fifth column (“Exemplary Activity Assay”) further describes the corresponding biological activity and also provides information pertaining to the various types of assays which may be performed to test, demonstrate, or quantify the corresponding biological activity.

[0385] The present invention is further directed to antibody-based therapies which involve administering antibodies of the invention to an animal, preferably a mammal, and most preferably a human, patient for treating one or more of the disclosed diseases, disorders, or conditions. Therapeutic compounds of the invention include, but are not limited to, antibodies of the invention (including fragments, analogs and derivatives thereof as described herein) and nucleic acids encoding antibodies of the invention (including fragments, analogs and derivatives thereof and anti-idiotypic antibodies as described herein). The antibodies of the invention can be used to detect, prevent, diagnose, prognosticate, treat, and/or ameliorate diseases, disorders or conditions associated with aberrant expression and/or activity of a polypeptide of the invention, including, but not limited to, gastrointestinal diseases and disorders. The treatment and/or prevention of gastrointestinal diseases and disorders associated with aberrant expression and/or activity of a polypeptide of the invention includes, but is not limited to, alleviating symptoms associated with gastrointestinal diseases and disorders. Antibodies of the invention may be provided in pharmaceutically acceptable compositions as known in the art or as described herein.

[0386] In a specific and preferred embodiment, the present invention is directed to antibody-based therapies which involve administering antibodies of the invention to an animal, preferably a mammal, and most preferably a human, patient for treating gastrointestinal diseases and disorders. Therapeutic compounds of the invention include, but are not limited to, antibodies of the invention (e.g., antibodies directed to the full length protein expressed on the cell surface of a mammalian cell; antibodies directed to an epitope of a polypeptide of the invention (such as, for example, a predicted linear epitope shown in column 7 of Table 1B.1; or a conformational epitope, including fragments, analogs and derivatives thereof as described herein) and nucleic acids encoding antibodies of the invention (including fragments, analogs and derivatives thereof and anti-idiotypic antibodies as described herein). The antibodies of the invention can be used to detect, diagnose, prevent, treat, prognosticate, and/or ameliorate gastrointestinal diseases, disorders or conditions associated with aberrant expression and/or activity of a polypeptide of the invention. The treatment and/or prevention of gastrointestinal diseases, disorders, or conditions associated with aberrant expression and/or activity of a polypeptide of the invention includes, but is not limited to, alleviating symptoms associated with those diseases, disorders or conditions. Antibodies of the invention may be provided in pharmaceutically acceptable compositions as known in the art or as described herein.

[0387] A summary of the ways in which the antibodies of the present invention may be used therapeutically includes binding polynucleotides or polypeptides of the present invention locally or systemically in the body or by direct cytotoxicity of the antibody, e.g. as mediated by complement (CDC) or by effector cells (ADCC). Some of these approaches are described in more detail below. Armed with the teachings provided herein, one of ordinary skill in the art will know how to use the antibodies of the present invention for diagnostic, monitoring or therapeutic purposes without undue experimentation.

[0388] The antibodies of this invention may be advantageously utilized in combination with other monoclonal or chimeric antibodies, or with lymphokines or hematopoietic growth factors (such as, e.g., IL-2, IL-3 and IL-7), for example, which serve to increase the number or activity of effector cells which interact with the antibodies.

[0389] The antibodies of the invention may be administered alone or in combination with other types of treatments (e.g., radiation therapy, chemotherapy, hormonal therapy, immunotherapy and anti-tumor agents). Generally, administration of products of a species origin or species reactivity (in the case of antibodies) that is the same species as that of the patient is preferred. Thus, in a preferred embodiment, human antibodies, fragments derivatives, analogs, or nucleic acids, are administered to a human patient for therapy or prophylaxis.

[0390] It is preferred to use high affinity and/or potent in vivo inhibiting and/or neutralizing antibodies against polypeptides or polynucleotides of the present invention, fragments or regions thereof, for both immunoassays directed to and therapy of gastrointestinal diseases and disorders related to polynucleotides or polypeptides, including fragments thereof, of the present invention. Such antibodies, fragments, or regions, will preferably have an affinity for polynucleotides or polypeptides of the invention, including fragments thereof. Preferred binding affinities include those with a dissociation constant or Kd less than 5×10⁻² M, 10⁻² M, 5×10⁻³ M, 10⁻³ M, 5×10⁻⁴ M, 10⁻⁴ M, 5×10⁻⁵ M, 10⁻⁵ M, 5×10⁻⁶ M, 10⁻⁶ M, 5×10⁻⁷ M, 10⁻⁷ M, 5×10⁻⁸ M, 10⁻⁸ M, 5×10⁻⁹ M, 5×10⁻¹⁰ M, 10⁻¹⁰ M, 5×10⁻¹¹ M, 10⁻¹¹ M, 5×10⁻¹² M, 10⁻¹² M, 5×10⁻¹³ M, 10⁻¹³ M, 5×10⁻¹⁴ M, 10⁻¹⁴ M, 5×10⁻¹⁵ M, and 10⁻¹⁵ M.

[0391] Gene Therapy

[0392] In a specific embodiment, nucleic acids comprising sequences encoding antibodies or functional derivatives thereof, are administered to treat, inhibit or prevent a gastrointestinal disease or disorder associated with aberrant expression and/or activity of a polypeptide of the invention, by way of gene therapy. Gene therapy refers to therapy performed by the administration to a subject of an expressed or expressible nucleic acid. In this embodiment of the invention, the nucleic acids produce their encoded protein that mediates a therapeutic effect.

[0393] Any of the methods for gene therapy available in the art can be used according to the present invention. Exemplary methods are described below.

[0394] For general reviews of the methods of gene therapy, see Goldspiel et al., Clinical Pharmacy 12:488-505 (1993); Wu and Wu, Biotherapy 3:87-95 (1991); Tolstoshev, Ann. Rev. Pharmacol. Toxicol. 32:573-596 (1993); Mulligan, Science 260:926-932 (1993); and Morgan and Anderson, Ann. Rev. Biochem. 62:191-217 (1993); May, TIBTECH 11(5):155-215 (1993). Methods commonly known in the art of recombinant DNA technology which can be used are described in Ausubel et al. (eds.), Current Protocols in Molecular Biology, John Wiley & Sons, NY (1993); and Kriegler, Gene Transfer and Expression, A Laboratory Manual, Stockton Press, NY (1990).

[0395] In a preferred embodiment, the compound comprises nucleic acid sequences encoding an antibody, said nucleic acid sequences being part of expression vectors that express the antibody or fragments or chimeric proteins or heavy or light chains thereof in a suitable host. In particular, such nucleic acid sequences have promoters operably linked to the antibody coding region, said promoter being inducible or constitutive, and, optionally, tissue-specific. In another particular embodiment, nucleic acid molecules are used in which the antibody coding sequences and any other desired sequences are flanked by regions that promote homologous recombination at a desired site in the genome, thus providing for intrachromosomal expression of the antibody encoding nucleic acids (Koller and Smithies, Proc. Natl. Acad. Sci. USA 86:8932-8935 (1989); Zijlstra et al., Nature 342:435438 (1989). In specific embodiments, the expressed antibody molecule is a single chain antibody; alternatively, the nucleic acid sequences include sequences encoding both the heavy and light chains, or fragments thereof, of the antibody.

[0396] Delivery of the nucleic acids into a patient may be either direct, in which case the patient is directly exposed to the nucleic acid or nucleic acid-carrying vectors, or indirect, in which case, cells are first transformed with the nucleic acids in vitro, then transplanted into the patient. These two approaches are known, respectively, as in vivo or ex vivo gene therapy.

[0397] In a specific embodiment, the nucleic acid sequences are directly administered in vivo, where it is expressed to produce the encoded product. This can be accomplished by any of numerous methods known in the art, e.g., by constructing them as part of an appropriate nucleic acid expression vector and administering it so that they become intracellular, e.g., by infection using defective or attenuated retrovirals or other viral vectors (see U.S. Pat. No. 4,980,286), or by direct injection of naked DNA, or by use of microparticle bombardment (e.g., a gene gun; Biolistic, Dupont), or coating with lipids or cell-surface receptors or transfecting agents, encapsulation in liposomes, microparticles, or microcapsules, or by administering them in linkage to a peptide which is known to enter the nucleus, by administering it in linkage to a ligand subject to receptor-mediated endocytosis (see, e.g., Wu and Wu, J. Biol. Chem. 262:4429-4432 (1987)) (which can be used to target cell types specifically expressing the receptors), etc. In another embodiment, nucleic acid-ligand complexes can be formed in which the ligand comprises a fusogenic viral peptide to disrupt endosomes, allowing the nucleic acid to avoid lysosomal degradation. In yet another embodiment, the nucleic acid can be targeted in vivo for cell specific uptake and expression, by targeting a specific receptor (see, e.g., PCT Publications WO 92/06180; WO 92/22635; W092/20316; W093/14188, WO 93/20221). Alternatively, the nucleic acid can be introduced intracellularly and incorporated within host cell DNA for expression, by homologous recombination (Koller and Smithies, Proc. Natl. Acad. Sci. USA 86:8932-8935 (1989); Zijlstra et al., Nature 342:435-438 (1989)).

[0398] In a specific embodiment, viral vectors that contains nucleic acid sequences encoding an antibody of the invention are used. For example, a retroviral vector can be used (see Miller et al., Meth. Enzymol. 217:581-599 (1993)). These retroviral vectors contain the components necessary for the correct packaging of the viral genome and integration into the host cell DNA. The nucleic acid sequences encoding the antibody to be used in gene therapy are cloned into one or more vectors, which facilitates delivery of the gene into a patient. More detail about retroviral vectors can be found in Boesen et al., Biotherapy 6:291-302 (1994), which describes the use of a retroviral vector to deliver the mdr1 gene to hematopoietic stem cells in order to make the stem cells more resistant to chemotherapy. Other references illustrating the use of retroviral vectors in gene therapy are: Clowes et al., J. Clin. Invest. 93:644-651 (1994); Kiem et al., Blood 83:1467-1473 (1994); Salmons and Gunzberg, Human Gene Therapy 4:129-141 (1993); and Grossman and Wilson, Curr. Opin. in Genetics and Devel. 3:110-114 (1993).

[0399] Adenoviruses are other viral vectors that can be used in gene therapy. Adenoviruses are especially attractive vehicles for delivering genes to respiratory epithelia. Adenoviruses naturally infect respiratory epithelia where they cause a mild disease. Other targets for adenovirus-based delivery systems are liver, the central nervous system, endothelial cells, and muscle. Adenoviruses have the advantage of being capable of infecting non-dividing cells. Kozarsky and Wilson, Current Opinion in Genetics and Development 3:499-503 (1993) present a review of adenovirus-based gene therapy. Bout et al., Human Gene Therapy 5:3-10 (1994) demonstrated the use of adenovirus vectors to transfer genes to the respiratory epithelia of rhesus monkeys. Other instances of the use of adenoviruses in gene therapy can be found in Rosenfeld et al., Science 252:431-434 (1991); Rosenfeld et al., Cell 68:143-155 (1992); Mastrangeli et al., J. Clin. Invest. 91:225-234 (1993); PCT Publication W094/12649; and Wang, et al., Gene Therapy 2:775-783 (1995). In a preferred embodiment, adenovirus vectors are used.

[0400] Adeno-associated virus (AAV) has also been proposed for use in gene therapy (Walsh et al., Proc. Soc. Exp. Biol. Med. 204:289-300 (1993); U.S. Pat. No. 5,436,146).

[0401] Another approach to gene therapy involves transferring a gene to cells in tissue culture by such methods as electroporation, lipofection, calcium phosphate mediated transfection, or viral infection. Usually, the method of transfer includes the transfer of a selectable marker to the cells. The cells are then placed under selection to isolate those cells that have taken up and are expressing the transferred gene. Those cells are then delivered to a patient.

[0402] In this embodiment, the nucleic acid is introduced into a cell prior to administration in vivo of the resulting recombinant cell. Such introduction can be carried out by any method known in the art, including but not limited to transfection, electroporation, microinjection, infection with a viral or bacteriophage vector containing the nucleic acid sequences, cell fusion, chromosome-mediated gene transfer, microcell-mediated gene transfer, spheroplast fusion, etc. Numerous techniques are known in the art for the introduction of foreign genes into cells (see, e.g., Loeffler and Behr, Meth. Enzymol. 217:599-618 (1993), Cohen et al., Meth. Enzymol. 217:618-644 (1993); Cline, Pharmac. Ther. 29:69-92m (1985) and may be used in accordance with the present invention, provided that the necessary developmental and physiological functions of the recipient cells are not disrupted. The technique should provide for the stable transfer of the nucleic acid to the cell, so that the nucleic acid is expressible by the cell and preferably heritable and expressible by its cell progeny.

[0403] The resulting recombinant cells can be delivered to a patient by various methods known in the art. Recombinant blood cells (e.g., hematopoietic stem or progenitor cells) are preferably administered intravenously. The amount of cells envisioned for use depends on the desired effect, patient state, etc., and can be determined by one skilled in the art.

[0404] Cells into which a nucleic acid can be introduced for purposes of gene therapy encompass any desired, available cell type, and include but are not limited to epithelial cells, endothelial cells, keratinocytes, fibroblasts, muscle cells, hepatocytes; blood cells such as T lymphocytes, B lymphocytes, monocytes, macrophages, neutrophils, eosinophils, megakaryocytes, granulocytes; various stem or progenitor cells, in particular hematopoietic stem or progenitor cells, e.g., as obtained from bone marrow, umbilical cord blood, peripheral blood, fetal liver, etc.

[0405] In a preferred embodiment, the cell used for gene therapy is autologous to the patient.

[0406] In an embodiment in which recombinant cells are used in gene therapy, nucleic acid sequences encoding an antibody are introduced into the cells such that they are expressible by the cells or their progeny, and the recombinant cells are then administered in vivo for therapeutic effect. In a specific embodiment, stem or progenitor cells are used. Any stem and/or progenitor cells, which can be isolated and maintained in vitro can potentially be used in accordance with this embodiment of the present invention (see e.g. PCT Publication WO 94/08598; Stemple and Anderson, Cell 71:973-985 (1992); Rheinwald, Meth. Cell Bio. 21A:229 (1980); and Pittelkow and Scott, Mayo Clinic Proc. 61:771 (1986)).

[0407] In a specific embodiment, the nucleic acid to be introduced for purposes of gene therapy comprises an inducible promoter operably linked to the coding region, such that expression of the nucleic acid is controllable by the presence or absence of an appropriate inducer of transcription.

[0408] Demonstration of Therapeutic or Prophylactic Activity

[0409] The compounds or pharmaceutical compositions of the invention are preferably tested in vitro, and then in vivo for the desired therapeutic or prophylactic activity, prior to use in humans. For example, in vitro assays to demonstrate the therapeutic or prophylactic utility of a compound or pharmaceutical composition include, the effect of a compound on a cell line or a patient tissue sample. The effect of the compound or composition on the cell line and/or tissue sample can be determined utilizing techniques known to those of skill in the art including, but not limited to, rosette formation assays and cell lysis assays. In accordance with the invention, in vitro assays which can be used to determine whether administration of a specific compound is indicated, include in vitro cell culture assays in which a patient tissue sample is grown in culture, and exposed to or otherwise administered a compound, and the effect of such compound upon the tissue sample is observed.

[0410] Therapeutic/Prophylactic Administration and Composition

[0411] The invention provides methods of treatment, inhibition and prophylaxis by administration to a subject of an effective amount of a compound or pharmaceutical composition of the invention, preferably a polypeptide or antibody of the invention. In a preferred embodiment, the compound is substantially purified (e.g., substantially free from substances that limit its effect or produce undesired side-effects). The subject is preferably an animal, including but not limited to animals such as cows, pigs, horses, chickens, cats, dogs, etc., and is preferably a mammal, and most preferably human.

[0412] Formulations and methods of administration that can be employed when the compound comprises a nucleic acid or an immunoglobulin are described above; additional appropriate formulations and routes of administration can be selected from among those described herein below.

[0413] Various delivery systems are known and can be used to administer a compound of the invention, e.g., encapsulation in liposomes, microparticles, microcapsules, recombinant cells capable of expressing the compound, receptor-mediated endocytosis (see, e.g., Wu and Wu, J. Biol. Chem. 262:44294432 (1987)), construction of a nucleic acid as part of a retroviral or other vector, etc. Methods of introduction include but are not limited to intradermal, intramuscular, intraperitoneal, intravenous, subcutaneous, intranasal, epidural, and oral routes. The compounds or compositions may be administered by any convenient route, for example by infusion or bolus injection, by absorption through epithelial or mucocutaneous linings (e.g., oral mucosa, rectal and intestinal mucosa, etc.) and may be administered together with other biologically active agents. Administration can be systemic or local. In addition, it may be desirable to introduce the pharmaceutical compounds or compositions of the invention into the central nervous system by any suitable route, including intraventricular and intrathecal injection; intraventricular injection may be facilitated by an intraventricular catheter, for example, attached to a reservoir, such as an Ommaya reservoir. Pulmonary administration can also be employed, e.g., by use of an inhaler or nebulizer, and formulation with an aerosolizing agent.

[0414] In a specific embodiment, it may be desirable to administer the pharmaceutical compounds or compositions of the invention locally to the area in need of treatment; this may be achieved by, for example, and not by way of limitation, local infusion during surgery, topical application, e.g., in conjunction with a wound dressing after surgery, by injection, by means of a catheter, by means of a suppository, or by means of an implant, said implant being of a porous, non-porous, or gelatinous material, including membranes, such as sialastic membranes, or fibers. Preferably, when administering a protein, including an antibody, of the invention, care must be taken to use materials to which the protein does not absorb.

[0415] In another embodiment, the compound or composition can be delivered in a vesicle, in particular a liposome (see Langer, Science 249:1527-1533 (1990); Treat et al., in Liposomes in the Therapy of Infectious Disease and Cancer, Lopez-Berestein and Fidler (eds.), Liss, New York, pp. 353-365 (1989); Lopez-Berestein, ibid., pp. 317-³27; see generally ibid.)

[0416] In yet another embodiment, the compound or composition can be delivered in a controlled release system. In one embodiment, a pump may be used (see Langer, supra; Sefton, CRC Crit. Ref. Biomed. Eng. 14:201 (1987); Buchwald et al., Surgery 88:507 (1980); Saudek et al., N. Engl. J. Med. 321:574 (1989)). In another embodiment, polymeric materials can be used (see Medical Applications of Controlled Release, Langer and Wise (eds.), CRC Pres., Boca Raton, Fla. (1974); Controlled Drug Bioavailability, Drug Product Design and Performance, Smolen and Ball (eds.), Wiley, New York (1984); Ranger and Peppas, J., Macromol. Sci. Rev. Macromol. Chem. 23:61 (1983); see also Levy et al., Science 228:190 (1985); During et al., Ann. Neurol. 25:351 (1989); Howard et al., J.Neurosurg. 71:105 (1989)). In yet another embodiment, a controlled release system can be placed in proximity of the therapeutic target, e.g., the brain, thus requiring only a fraction of the systemic dose (see, e.g., Goodson, in Medical Applications of Controlled Release, supra, vol. 2, pp. 115-138 (1984)).

[0417] Other controlled release systems are discussed in the review by Langer (Science 249:1527-1533 (1990)).

[0418] In a specific embodiment where the compound of the invention is a nucleic acid encoding a protein, the nucleic acid can be administered in vivo to promote expression of its encoded protein, by constructing it as part of an appropriate nucleic acid expression vector and administering it so that it becomes intracellular, e.g., by use of a retroviral vector (see U.S. Pat. No. 4,980,286), or by direct injection, or by use of microparticle bombardment (e.g., a gene gun; Biolistic, Dupont), or coating with lipids or cell-surface receptors or transfecting agents, or by administering it in linkage to a homeobox-like peptide which is known to enter the nucleus (see e.g., Joliot et al., Proc. Natl. Acad. Sci. USA 88:1864-1868 (1991)), etc. Alternatively, a nucleic acid can be introduced intracellularly and incorporated within host cell DNA for expression, by homologous recombination.

[0419] The present invention also provides pharmaceutical compositions. Such compositions comprise a therapeutically effective amount of a compound, and a pharmaceutically acceptable carrier. In a specific embodiment, the term “pharmaceutically acceptable” means approved by a regulatory agency of the Federal or a state government or listed in the U.S. Pharmacopeia or other generally recognized pharmacopeia for use in animals, and more particularly in humans. The term “carrier” refers to a diluent, adjuvant, excipient, or vehicle with which the therapeutic is administered. Such pharmaceutical carriers can be sterile liquids, such as water and oils, including those of petroleum, animal, vegetable or synthetic origin, such as peanut oil, soybean oil, mineral oil, sesame oil and the like. Water is a preferred carrier when the pharmaceutical composition is administered intravenously. Saline solutions and aqueous dextrose and glycerol solutions can also be employed as liquid carriers, particularly for injectable solutions. Suitable pharmaceutical excipients include starch, glucose, lactose, sucrose, gelatin, malt, rice, flour, chalk, silica gel, sodium stearate, glycerol monostearate, talc, sodium chloride, dried skim milk, glycerol, propylene, glycol, water, ethanol and the like. The composition, if desired, can also contain minor amounts of wetting or emulsifying agents, or pH buffering agents. These compositions can take the form of solutions, suspensions, emulsion, tablets, pills, capsules, powders, sustained-release formulations and the like. The composition can be formulated as a suppository, with traditional binders and carriers such as triglycerides. Oral formulation can include standard carriers such as pharmaceutical grades of mannitol, lactose, starch, magnesium stearate, sodium saccharine, cellulose, magnesium carbonate, etc. Examples of suitable pharmaceutical carriers are described in “Remington's Pharmaceutical Sciences” by E. W. Martin. Such compositions will contain a therapeutically effective amount of the compound, preferably in purified form, together with a suitable amount of carrier so as to provide the form for proper administration to the patient. The formulation should suit the mode of administration.

[0420] In a preferred embodiment, the composition is formulated in accordance with routine procedures as a pharmaceutical composition adapted for intravenous administration to human beings. Typically, compositions for intravenous administration are solutions in sterile isotonic aqueous buffer. Where necessary, the composition may also include a solubilizing agent and a local anesthetic such as lignocaine to ease pain at the site of the injection. Generally, the ingredients are supplied either separately or mixed together in unit dosage form, for example, as a dry lyophilized powder or water free concentrate in a hermetically sealed container such as an ampoule or sachette indicating the quantity of active agent. Where the composition is to be administered by infusion, it can be dispensed with an infusion bottle containing sterile pharmaceutical grade water or saline. Where the composition is administered by injection, an ampoule of sterile water for injection or saline can be provided so that the ingredients may be mixed prior to administration.

[0421] The compounds of the invention can be formulated as neutral or salt forms. Pharmaceutically acceptable salts include those formed with anions such as those derived from hydrochloric, phosphoric, acetic, oxalic, tartaric acids, etc., and those formed with cations such as those derived from sodium, potassium, ammonium, calcium, ferric hydroxides, isopropylamine, triethylamine, 2-ethylamino ethanol, histidine, procaine, etc.

[0422] The amount of the compound of the invention which will be effective in the treatment, inhibition and prevention of a disease or disorder associated with aberrant expression and/or activity of a polypeptide of the invention can be determined by standard clinical techniques. In addition, in vitro assays may optionally be employed to help identify optimal dosage ranges. The precise dose to be employed in the formulation will also depend on the route of administration, and the seriousness of the disease or disorder, and should be decided according to the judgment of the practitioner and each patient's circumstances. Effective doses may be extrapolated from dose-response curves derived from in vitro or animal model test systems.

[0423] For antibodies, the dosage administered to a patient is typically 0.1 mg/kg to 100 mg/kg of the patient's body weight. Preferably, the dosage administered to a patient is between 0.1 mg/kg and 20 mg/kg of the patient's body weight, more preferably 1 mg/kg to 10 mg/kg of the patient's body weight. Generally, human antibodies have a longer half-life within the human body than antibodies from other species due to the immune response to the foreign polypeptides. Thus, lower dosages of human antibodies and less frequent administration is often possible. Further, the dosage and frequency of administration of antibodies of the invention may be reduced by enhancing uptake and tissue penetration (e.g., into the brain) of the antibodies by modifications such as, for example, lipidation.

[0424] The invention also provides a pharmaceutical pack or kit comprising one or more containers filled with one or more of the ingredients of the pharmaceutical compositions of the invention. Optionally associated with such container(s) can be a notice in the form prescribed by a governmental agency regulating the manufacture, use or sale of pharmaceuticals or biological products, which notice reflects approval by the agency of manufacture, use or sale for human administration.

[0425] Diagnosis and Imaging

[0426] Labeled antibodies, and derivatives and analogs thereof, which specifically bind to a polypeptide of interest can be used for diagnostic purposes to detect, diagnose, prognosticate, or monitor gastrointestinal diseases, disorders, and/or conditions associated with the aberrant expression and/or activity of a polypeptide of the invention. The invention provides for the detection of aberrant expression of a polypeptide of interest, comprising (a) assaying the expression of the polypeptide of interest in cells or body fluid of an individual using one or more antibodies specific to the polypeptide interest and (b) comparing the level of gene expression with a standard gene expression level, whereby an increase or decrease in the assayed polypeptide gene expression level compared to the standard expression level is indicative of aberrant expression.

[0427] The invention provides a diagnostic assay for diagnosing a gastrointestinal disease or disorder, comprising (a) assaying the expression of the polypeptide of interest in cells or body fluid of an individual using one or more antibodies specific to the polypeptide interest and (b) comparing the level of gene expression with a standard gene expression level, whereby an increase or decrease in the assayed polypeptide gene expression level compared to the standard expression level is indicative of a particular gastrointestional disease or disorder. With respect to gastrointestinal cancers, the presence o(f a relatively high amount of transcript in biopsied tissue from an individual may indicate a predisposition for the development of the disease, or may provide a means for detecting the disease prior to the appearance of actual clinical symptoms. A more definitive diagnosis of this type may allow health professionals to employ preventative measures or aggressive treatment earlier thereby preventing the development or further progression of the gastrointestinal cancer.

[0428] Antibodies of the invention can be used to assay protein levels in a biological sample using classical immunohistological methods known to those of skill in the art (e.g., see Jalkanen et al., J. Cell. Biol. 101:976-985 (1985); Jalkanen et al., J. Cell . Biol. 105:3087-3096 (1987)). Other antibody-based methods useful for detecting protein gene expression include immunoassays, such as the enzyme linked immunosorbent assay (ELISA) and the radioimmunoassay (RIA). Suitable antibody assay labels are known in the art and include enzyme labels, such as, glucose oxidase; radioisotopes, such as iodine (125I, 12II), carbon (14C), sulfur (35S), tritium (3H), indium (112In), and technetium (99Tc); luminescent labels, such as luminol; and fluorescent labels, such as fluorescein and rhodamine, and biotin.

[0429] One facet of the invention is the detection and diagnosis of a disease or disorder associated with aberrant expression of a polypeptide of interest in an animal, preferably a mammal and most preferably a human. In one embodiment, diagnosis comprises: a) administering (for example, parenterally, subcutaneously, or intraperitoneally) to a subject an effective amount of a labeled molecule which specifically binds to the polypeptide of interest; b) waiting for a time interval following the administering for permitting the labeled molecule to preferentially concentrate at sites in the subject where the polypeptide is expressed (and for unbound labeled molecule to be cleared to background level); c) determining background level; and d) detecting the labeled molecule in the subject, such that detection of labeled molecule above the background level indicates that the subject has a particular disease or disorder associated with aberrant expression of the polypeptide of interest. Background level can be determined by various methods including, comparing the amount of labeled molecule detected to a standard value previously determined for a particular system.

[0430] It will be understood in the art that the size of the subject and the imaging system used will determine the quantity of imaging moiety needed to produce diagnostic images. In the case of a radioisotope moiety, for a human subject, the quantity of radioactivity injected will normally range from about 5 to 20 millicuries of 99 mTc. The labeled antibody or antibody fragment will then preferentially accumulate at the location of cells which contain the specific protein. In vivo tumor imaging is described in S. W. Burchiel et al., “Immunopharmacokinetics of Radiolabeled Antibodies and Their Fragments.” (Chapter 13 in Tumor Imaging: The Radiochemical Detection of Cancer, S. W. Burchiel and B. A. Rhodes, eds., Masson Publishing Inc. (1982)).

[0431] Depending on several variables, including the type of label used and the mode of administration, the time interval following the administration for permitting the labeled molecule to preferentially concentrate at sites in the subject and for unbound labeled molecule to be cleared to background level is 6 to 48 hours or 6 to 24 hours or 6 to 12 hours. In another embodiment the time interval following administration is 5 to 20 days or 5 to 10 days.

[0432] In an embodiment, monitoring of the disease or disorder is carried out by repeating the method for diagnosing the disease or disease, for example, one month after initial diagnosis, six months after initial diagnosis, one year after initial diagnosis, etc.

[0433] Presence of the labeled molecule can be detected in the patient using methods known in the art for in vivo scanning. These methods depend upon the type of label used. Skilled artisans will be able to determine the appropriate method for detecting a particular label. Methods and devices that may be used in the diagnostic methods of the invention include, but are not limited to, computed tomography (CT), whole body scan such as position emission tomography (PET), magnetic resonance imaging (MRI), and sonography.

[0434] In a specific embodiment, the molecule is labeled with a radioisotope and is detected in the patient using a radiation responsive surgical instrument (Thurston et al., U.S. Pat. No. 5,441,050). In another embodiment, the molecule is labeled with a fluorescent compound and is detected in the patient using a fluorescence responsive scanning instrument. In another embodiment, the molecule is labeled with a positron emitting metal and is detected in the patent using positron emission-tomography. In yet another embodiment, the molecule is labeled with a paramagnetic label and is detected in a patient using magnetic resonance imaging (MRI).

[0435] Kits

[0436] The present invention provides kits that can be used in the above methods. In one embodiment, a kit comprises an antibody of the invention, preferably a purified antibody, in one or more containers. In a specific embodiment, the kits of the present invention contain a substantially isolated polypeptide comprising an epitope which is specifically immunoreactive with an antibody included in the kit. Preferably, the kits of the present invention further comprise a control antibody which does not react with the polypeptide of interest. In another specific embodiment, the kits of the present invention contain a means for detecting the binding of an antibody to a polypeptide of interest (e.g., the antibody may be conjugated to a detectable substrate such as a fluorescent compound, an enzymatic substrate, a radioactive compound or a luminescent compound, or a second antibody which recognizes the first antibody may be conjugated to a detectable substrate).

[0437] In another specific embodiment of the present invention, the kit is a diagnostic kit for use in screening serum containing antibodies specific against proliferative and/or cancerous polynucleotides and polypeptides. Such a kit may include a control antibody that does not react with the polypeptide of interest. Such a kit may include a substantially isolated polypeptide antigen comprising an epitope which is specifically immunoreactive with at least one anti-polypeptide antigen antibody. Further, such a kit includes means for detecting the binding of said antibody to the antigen (e.g., the antibody may be conjugated to a fluorescent compound such as fluorescein or rhodamine which can be detected by flow cytometry). In specific embodiments, the kit may include a recombinantly produced or chemically synthesized polypeptide antigen. The polypeptide antigen of the kit may also be attached to a solid support.

[0438] In a more specific embodiment the detecting means of the above-described kit includes a solid support to which said polypeptide antigen is attached. Such a kit may also include a non-attached reporter-labeled anti-human antibody. In this embodiment, binding of the antibody to the polypeptide antigen can be detected by binding of the said reporter-labeled antibody.

[0439] In an additional embodiment, the invention includes a diagnostic kit for use in screening serum containing antigens of the polypeptide of the invention. The diagnostic kit includes a substantially isolated antibody specifically immunoreactive with polypeptide or polynucleotide antigens, and means for detecting the binding of the polynucleotide or polypeptide antigen to the antibody. In one embodiment, the antibody is attached to a solid support. In a specific embodiment, the antibody may be a monoclonal antibody. The detecting means of the kit may include a second, labeled monoclonal antibody. Alternatively, or in addition, the detecting means may include a labeled, competing antigen.

[0440] In one diagnostic configuration, test serum is reacted with a solid phase reagent having a surface-bound antigen obtained by the methods of the present invention. After binding with specific antigen antibody to the reagent and removing unbound serum components by washing, the reagent is reacted with reporter-labeled anti-human antibody to bind reporter to the reagent in proportion to the amount of bound anti-antigen antibody on the solid support. The reagent is again washed to remove unbound labeled antibody, and the amount of reporter associated with the reagent is determined. Typically, the reporter is an enzyme which is detected by incubating the solid phase in the presence of a suitable fluorometric, luminescent or colorimetric substrate (Sigma, St. Louis, Mo.).

[0441] The solid surface reagent in the above assay is prepared by known techniques for attaching protein material to solid support material, such as polymeric beads, dip sticks, 96-well plate or filter material. These attachment methods generally include non-specific adsorption of the protein to the support or covalent attachment of the protein, typically through a free amine group, to a chemically reactive group on the solid support, such as an activated carboxyl, hydroxyl, or aldehyde group. Alternatively, streptavidin coated plates can be used in conjunction with biotinylated antigen(s).

[0442] Thus, the invention provides an assay system or kit for carrying out this diagnostic method. The kit generally includes a support with surface-bound recombinant antigens, and a reporter-labeled anti-human antibody for detecting surface-bound anti-antigen antibody.

[0443] Uses of the Polynucleotides

[0444] Each of the polynucleotides identified herein can be used in numerous ways as reagents. The following description should be considered exemplary and utilizes known techniques.

[0445] The polynucleotides of the present invention are useful for chromosome identification. There exists an ongoing need to identify new chromosome markers, since few chromosome marking reagents, based on actual sequence data (repeat polymorphisms), are presently available. Each sequence is specifically targeted to and can hybridize with a particular location on an individual human chromosome, thus each polynucleotide of the present invention can routinely be used as a chromosome marker using techniques known in the art. Table 1B.1, column 8 provides the chromosome location of some of the polynucleotides of the invention.

[0446] Briefly, sequences can be mapped to chromosomes by preparing PCR primers (preferably at least 15 bp (e.g., 15-25 bp) from the sequences shown in SEQ ID NO:X. Primers can optionally be selected using computer analysis so that primers do not span more than one predicted exon in the genomic DNA. These primers are then used for PCR screening of somatic cell hybrids containing individual human chromosomes. Only those hybrids containing the human gene corresponding to SEQ ID NO:X will yield an amplified fragment.

[0447] Similarly, somatic hybrids provide a rapid method of PCR mapping the polynucleotides to particular chromosomes. Three or more clones can be assigned per day using a single thermal cycler. Moreover, sublocalization of the polynucleotides can be achieved with panels of specific chromosome fragments. Other gene mapping strategies that can be used include in situ hybridization, prescreening with labeled flow-sorted chromosomes, preselection by hybridization to construct chromosome specific-cDNA libraries, and computer mapping techniques (See, e.g., Shuler, Trends Biotechnol 16:456-459 (1998) which is hereby incorporated by reference in its entirety).

[0448] Precise chromosomal location of the polynucleotides can also be achieved using fluorescence in situ hybridization (FISH) of a metaphase chromosomal spread. This technique uses polynucleotides as short as 500 or 600 bases; however, polynucleotides 2,000-4,000 bp are preferred. For a review of this technique, see Verma et al., “Human Chromosomes: a Manual of Basic Techniques,” Pergamon Press, New York (1988).

[0449] For chromosome mapping, the polynucleotides ran be used individually (to mark a single chromosome or a single site on that chromosome) or in panels (for marking multiple sites and/or multiple chromosomes).

[0450] Thus, the present invention also provides a method for chromosomal localization which involves (a) preparing PCR primers from the polynucleotide sequences in Table 1B and/or Table 2 and SEQ ID NO:X and (b) screening somatic cell hybrids containing individual chromosomes.

[0451] The polynucleotides of the present invention would likewise be useful for radiation hybrid mapping, HAPPY mapping, and long range restriction mapping. For a review of these techniques and others known in the art, see, e.g. Dear, “Genome Mapping: A Practical Approach,” IRL Press at Oxford University Press, London (1997); Aydin, J. Mol. Med. 77:691-694 (1999); Hacia et al., Mol. Psychiatry 3:483-492 (1998); Herrick et al., Chromosome Res. 7:409-423 (1999); Hamilton et al., Methods Cell Biol. 62:265-280 (2000); and/or Ott, J. Hered. 90:68-70 (1999) each of which is hereby incorporated by reference in its entirety.

[0452] Once a polynucleotide has been mapped to a precise chromosomal location, the physical position of the polynucleotide can be used in linkage analysis. Linkage analysis establishes coinheritance between a chromosomal location and presentation of a particular disease. (Disease mapping data are found, for example, in V. McKusick, Mendelian Inheritance in Man (available on line through Johns Hopkins University Welch Medical Library)). Column 9 of Table 1B.1 provides an OMIM reference identification number of diseases associated with the cytologic band disclosed in column 8 of Table 1B.1, as determined using techniques described herein and by reference to Table 5. Assuming 1 megabase mapping resolution and one gene per 20 kb, a cDNA precisely localized to a chromosomal region associated with the disease could be one of 50-500 potential causative genes.

[0453] Thus, once coinheritance is established, differences in a polynucleotide of the invention and the corresponding gene between affected and unaffected individuals can be examined. First, visible structural alterations in the chromosomes, such as deletions or translocations, are examined in chromosome spreads or by PCR. If no structural alterations exist, the presence of point mutations are ascertained. Mutations observed in some or all affected individuals, but not in normal individuals, indicates that the mutation may cause the disease. However, complete sequencing of the polypeptide and the corresponding gene from several normal individuals is required to distinguish the mutation from a polymorphism. If a new polymorphism is identified, this polymorphic polypeptide can be used for further linkage analysis.

[0454] Furthermore, increased or decreased expression of the gene in affected individuals as compared to unaffected individuals can be assessed using the polynucleotides of the invention. Any of these alterations (altered expression, chromosomal rearrangement, or mutation) can be used as a diagnostic or prognostic marker. Diagnostic and prognostic methods, kits and reagents encompassed by the present invention are briefly described below and more thoroughly elsewhere herein (see e.g., the sections labeled “Antibodies”, “Diagnostic Assays”, and “Methods for Detecting Diseases”).

[0455] Thus, the invention also provides a diagnostic method useful during diagnosis of a disorder, involving measuring the expression level of polynucleotides of the present invention in cells or body fluid from an individual and comparing the measured gene expression level with a standard level of polynucleotide expression level, whereby an increase or decrease in the gene expression level compared to the standard is indicative of a disorder. Additional non-limiting examples of diagnostic methods encompassed by the present invention are more thoroughly described elsewhere herein (see, e.g., Example 12).

[0456] In still another embodiment, the invention includes a kit for analyzing samples for the presence of proliferative and/or cancerous polynucleotides derived from a test subject. In a general embodiment, the kit includes at least one polynucleotide probe containing a nucleotide sequence that will specifically hybridize with a polynucleotide of the invention and a suitable container. In a specific embodiment, the kit includes two polynucleotide probes defining an internal region of the polynucleotide of the invention, where each probe has one strand containing a 31′mer-end internal to the region. In a further embodiment, the probes may be useful as primers for polymerase chain reaction amplification.

[0457] Where a diagnosis of a related disorder, including, for example, diagnosis of a tumor, has already been made according to conventional methods, the present invention is useful as a prognostic indicator, whereby patients exhibiting enhanced or depressed polynucleotide of the invention expression will experience a worse clinical outcome relative to patients expressing the gene at a level nearer the standard level.

[0458] By “measuring the expression level of polynucleotides of the invention” is intended qualitatively or quantitatively measuring or estimating the level of the polypeptide of the invention or the level of the mRNA encoding the polypeptide of the invention in a first biological sample either directly (e.g., by determining or estimating absolute protein level or mRNA level) or relatively (e.g., by comparing to the polypeptide level or mRNA level in a second biological sample). Preferably, the polypeptide level or mRNA level in the first biological sample is measured or estimated and compared to a standard polypeptide level or mRNA level, the standard being taken from a second biological sample obtained from an individual not having the related disorder or being determined by averaging levels from a population of individuals not having a related disorder. As will be appreciated in the art, once a standard polypeptide level or mRNA level is known, it can be used repeatedly as a standard for comparison.

[0459] By “biological sample” is intended any biological sample obtained from an individual, body fluid, cell line, tissue culture, or other source which contains polypeptide of the present invention or the corresponding mRNA. As indicated, biological samples include body fluids (such as semen, lymph, vaginal pool, sera, plasma, urine, synovial fluid and spinal fluid) which contain the polypeptide of the present invention, and tissue sources found to express the polypeptide of the present invention. Methods for obtaining tissue biopsies and body fluids from mammals are well known in the art. Where the biological sample is to include mRNA, a tissue biopsy is the preferred source.

[0460] The method(s) provided above may preferably be applied in a diagnostic method and/or kits in which polynucleotides and/or polypeptides of the invention are attached to a solid support. In one exemplary method, the support way be a “gene chip” or a “biological chip” as described in U.S. Pat. Nos. 5,837,832, 5,874,219, and 5,856,174. Further, such a gene chip with polynucleotides of the invention attached may be used to identify polymorphisms between the isolated polynucleotide sequences of the invention, with polynucleotides isolated from a test subject. The knowledge of such polymorphisms (i.e. their location, as well as, their existence) would be beneficial in identifying disease loci for many disorders, such as for example, in neural disorders, immune system disorders, muscular disorders, reproductive disorders, gastrointestinal disorders, pulmonary disorders, digestive disorders, metabolic disorders, cardiovascular disorders, renal disorders, proliferative disorders, and/or cancerous diseases and conditions. Such a method is described in U.S. Pat. Nos. 5,858,659 and 5,856,104. The US patents referenced supra are hereby incorporated by reference in their entirety herein.

[0461] The present invention encompasses polynucleotides of the present invention that are chemically synthesized, or reproduced as peptide nucleic acids (PNA), or according to other methods known in the art. The use of PNAs would serve as the preferred form if the polynucleotides of the invention are incorporated onto a solid support, or gene chip. For the purposes of the present invention, a peptide nucleic acid (PNA) is a polyamide type of DNA analog and the monomeric units for adenine, guanine, thymine and cytosine are available commercially (Perceptive Biosystems). Certain components of DNA, such as phosphorus, phosphorus oxides, or deoxyribose derivatives, are not present in PNAs. As disclosed by Nielsen et al., Science 254, 1497 (1991); and Egholm et al., Nature 365, 666 (1993), PNAs bind specifically and tightly to complementary DNA strands and are not degraded by nucleases. In fact, PNA binds more strongly to DNA than DNA itself does. This is probably because there is no electrostatic repulsion between the two strands, and also the polyamide backbone is more flexible. Because of this, PNA/DNA duplexes bind under a wider range of stringency conditions than DNA/DNA duplexes, making it easier to perform multiplex hybridization. Smaller probes can be used than with DNA due to the strong binding. In addition, it is more likely that single base mismatches can be determined with PNA/DNA hybridization because a single mismatch. in a PNA/DNA 15-mer lowers the melting point (T.sub.m) by 8°-20° C., vs. 4°-16° C. for the DNA/DNA 15-mer duplex. Also, the absence of charge groups in, PNA means that hybridization can be done at low ionic strengths and reduce possible interference by salt during the analysis.

[0462] The compounds of the present invention have uses which include, but are not limited to, detecting cancer in mammals. In particular the invention is useful during diagnosis of pathological cell proliferative neoplasias which include, but are not limited to: acute myelogenous leukemias including acute monocytic leukemia, acute myeloblastic leukemia, acute promyelocytic leukemia, acute myelomonocytic leukemia, acute erythroleukemia, acute megakaryocytic leukemia, and acute undifferentiated leukemia, etc.; and chronic myelogenous leukemias including chronic myelomonocytic leukemia, chronic granulocytic leukemia, etc. Preferred mammals include monkeys, apes, cats, dogs, cows, pigs, horses, rabbits and humans. Particularly preferred are humans.

[0463] Pathological cell proliferative disorders are often associated with inappropriate activation of proto-oncogenes. (Gelmann, E. P. et al., “The Etiology of Acute Leukemia: Molecular Genetics and Viral Oncology,” in Neoplastic Diseases of the Blood, Vol 1., Wiernik, P. H. et al. eds., 161-182 (1985)). Neoplasias are now believed to result from the qualitative alteration of a normal cellular gene product, or from the quantitative modification of gene expression by insertion into the chromosome of a viral sequence, by chromosomal translocation of a gene to a more actively transcribed region, or by some other mechanism. (Gelmann et al., supra) It is likely that mutated or altered expression of specific genes is involved in the pathogenesis of some leukemias, among other tissues and cell types. (Gelmann et al., supra) Indeed, the human counterparts of the oncogenes involved in some animal neoplasias have been amplified or translocated in some cases of human leukemia and carcinoma. (Gelmann et al., supra)

[0464] For example, c-myc expression is highly amplified in the non-lymphocytic leukemia cell line HL-60. When HL-60 cells are chemically induced to stop proliferation, the level of c-myc is found to be downregulated. (International Publication Number WO 91/15580). However, it has been shown that exposure of HL-60 cells to a DNA construct that is complementary to the 5′ end of c-myc or c-myb blocks translation of the corresponding mRNAs which downregulates expression of the c-myc or c-myb proteins and causes arrest of cell proliferation and differentiation of the treated cells. (International Publication Number WO 91/15580; Wickstrom et al., Proc. Natl. Acad. Sci. 85:1028 (1988); Anfossi et al., Proc. Natl. Acad. Sci. 86:3379 (1989)). However, the skilled artisan would appreciate the present invention's usefulness is not be limited to treatment, prevention, and/or prognosis of proliferative disorders of cells and tissues of hematopoietic origin, in light of the numerous cells and cell types of varying origins which are known to exhibit proliferative phenotypes.

[0465] In addition to the foregoing, a polynucleotide of the present invention can be used to control gene expression through triple helix formation or through antisense DNA or RNA. Antisense techniques are discussed, for example, in Okano, J. Neurochem. 56: 560 (1991); “Oligodeox“Oligodeoxynucleotides as Antisense Inhibitors of Gene Expression, CRC Press, Boca Raton, Fla. (1988). Triple helix formation is discussed in, for instance Lee et al., Nucleic Acids Research 6: 3073 (1979); Cooney et al., Science 241: 456 (1988); and Dervan et al., Science 251: 1360 (1991). Both methods rely on binding of the polynucleotide to a complementary DNA or RNA. For these techniques, preferred polynucleotides are usually oligonucleotides 20 to 40 bases in length and complementary to either the region of the gene involved in transcription (triple helix—see Lee et al., Nucl. Acids Res. 6:3073 (1979); Cooney et al., Science 241:456 (1988); and Dervan et al., Science 251:1360 (1991)) or to the mRNA itself (antisense—Okano, J. Neurochem. 56:560 (1991); Oligodeoxy-nucleotides as Antisense Inhibitors of Gene Expression, CRC Press, Boca Raton, Fla. (1988)). Triple helix formation optimally results in a shut-off of RNA transcription from DNA, while antisense RNA hybridization blocks translation of an mRNA molecule into polypeptide. The oligonucleotide described above can also be delivered to cells such that the antisense RNA or DNA may be expressed in vivo to inhibit production of polypeptide of the present invention antigens. Both techniques are effective in model systems, and the information disclosed herein can be used to design antisense or triple helix polynucleotides in an effort to treat disease, and in particular, for the treatment of proliferative diseases and/or conditions. Non-limiting antisense and triple helix methods encompassed by the present invention are more thoroughly described elsewhere herein (see, e.g., the section labeled “Antisense and Ribozyme (Antagonists)”).

[0466] Polynucleotides of the present invention are also useful in gene therapy. One goal of gene therapy is to insert a normal gene into an organism having a defective gene, in an effort to correct the genetic defect. The polynucleotides disclosed in the present invention offer a means of targeting such genetic defects in a highly accurate manner. Another goal is to insert a new gene that was not present in the host genome, thereby producing a new trait in the host cell. Additional non-limiting examples of gene therapy methods encompassed by the present invention are more thoroughly described elsewhere herein (see, e.g., the sections labeled “Gene Therapy Methods”, and Examples 16, 17 and 18).

[0467] The polynucleotides are also useful for identifying individuals from minute biological samples. The United States military, for example, is considering the use of restriction fragment length polymorphism (RFLP) for identification of its personnel. In this technique, an individual's genomic DNA is digested with one or more restriction enzymes, and probed on a Southern blot to yield unique bands for identifying personnel. This method does not suffer from the current limitations of “Dog Tags” which can be lost, switched, or stolen, making positive identification difficult. The polynucleotides of the present invention can be used as additional DNA markers for RFLP.

[0468] The polynucleotides of the present invention can also be used as an alternative to RFLP, by determining the actual base-by-base DNA sequence of selected portions of an individual's genome. These sequences can be used to prepare PCR primers for amplifying and isolating such selected DNA, which can then be sequenced. Using this technique, individuals can be identified because each individual will have a unique set of DNA sequences. Once an unique ID database is established for an individual, positive identification of that individual, living or dead, can be made from extremely small tissue samples.

[0469] Forensic biology also benefits from using DNA-based identification techniques as disclosed herein. DNA sequences taken from very small biological samples such as tissues, e.g., hair or skin, or body fluids, e.g., blood, saliva, semen, synovial fluid, amniotic fluid, breast milk, lymph; pulmonary sputum or surfactant, urine, fecal matter, etc., can be amplified using PCR. In one prior art technique, gene sequences amplified from polymorphic loci, such as DQa class II HLA gene, are used in forensic biology to identify individuals. (Erlich, H., PCR Technology, Freeman and Co. (1992)). Once these specific polymorphic loci are amplified, they are digested with one or more restriction enzymes, yielding an identifying set of bands on a Southern blot probed with DNA corresponding to the DQa class II HLA gene. Similarly, polynucleotides of the present invention can be used as polymorphic markers for forensic purposes.

[0470] There is also a need for reagents capable of identifying the source of a particular tissue. Such need arises, for example, in forensics when presented with tissue of unknown origin. Appropriate reagents can comprise, for example, DNA probes or primers prepared from the sequences of the present invention, specific to tissues, including but not limited to those shown in Table 1B. Panels of such reagents can identify tissue by species and/or by organ type. In a similar fashion, these reagents can be used to screen tissue cultures for contamination. Additional non-limiting examples of such uses are further described herein.

[0471] The polynucleotides of the present invention are also useful as hybridization probes for differential identification of the tissue(s) or cell type(s) present in a biological sample. Similarly, polypeptides and antibodies directed to polypeptides of the present invention are useful to provide immunological probes for differential identification of the tissue(s) (e.g., immunohistochemistry assays) or cell type(s) (e.g., immunocytochemistry assays). In addition, for a number of disorders of the above tissues or cells, significantly higher or lower levels of gene expression of the polynucleotides/polypeptides of the present invention may be detected in certain tissues (e.g., tissues expressing polypeptides and/or polynucleotides of the present invention, for example, those disclosed in Table 1B, and/or cancerous and/or wounded tissues) or bodily fluids (e.g., semen, lymph, vaginal pool, serum, plasma, urine, synovial fluid or spinal fluid) taken from an individual having such a disorder, relative to a “standard” gene expression level, i.e., the expression level in healthy tissue from an individual not having the disorder.

[0472] Thus, the invention provides a diagnostic method of a disorder, which involves: (a) assaying gene expression level in cells or body fluid of an individual; (b) comparing the gene expression level with a standard gene expression level, whereby an increase or decrease in the assayed gene expression level compared to the standard expression level is indicative of a disorder.

[0473] In the very least, the polynucleotides of the present invention can be used as molecular weight markers on Southern gels, as diagnostic probes for the presence of a specific mRNA in a particular cell type, as a probe to “subtract-out” known sequences in the process of discovering novel polynucleotides, for selecting and making oligomers for attachment to a “gene chip” or other support, to raise anti-DNA antibodies using DNA immunization techniques, and as an antigen to elicit an immune response.

[0474] Uses of the Polypeptides

[0475] Each of the polypeptides identified herein can be used in numerous ways. The following description should be considered exemplary and utilizes known techniques.

[0476] Polypeptides and antibodies directed to polypeptides of the present invention are useful to provide immunological probes for differential identification of the tissue(s) (e.g., immunohistochemistry assays such as, for example, ABC immunoperoxidase (Hsu et al., J. Histochem. Cytochem. 29:577-580 (1981)) or cell type(s) (e.g., immunocytochemistry assays).

[0477] Antibodies can be used to assay levels of polypeptides encoded by polynucleotides of the invention in a biological sample using classical immunohistological methods known to those of skill in the art (e.g., see Jalkanen, et al., J. Cell. Biol. 101:976-985 (1985); Jalkanen, et al., J. Cell. Biol. 105:3087-3096 (1987)). Other antibody-based methods useful for detecting protein gene expression include immunoassays, such as the enzyme linked immunosorbent assay (ELISA) and the radioimmunoassay (RIA). Suitable antibody assay labels are known in the art and include enzyme labels, such as, glucose oxidase; radioisotopes, such as iodine (¹³¹I, ¹²⁵I, ¹²³I, ¹²¹I), carbon (¹⁴C), sulfur (³⁵S), tritium (³H), indium (^{115m}In, ^{113m}In, ¹¹²In, ¹¹¹In), and technetium (⁹⁹Tc, ^{99m}Tc), thallium (²⁰¹Ti), gallium (⁶⁸Ga, ⁶⁷Ga), palladium (¹⁰³Pd), molybdenum (⁹⁹Mo), xenon (¹³³Xe), fluorine (¹⁸F), ¹⁵³Sm, ¹⁷⁷Lu, ¹⁵⁹Gd, ¹⁴⁹Pm, ¹⁴⁰La, ¹⁷⁵Yb, ¹⁶⁶Ho, ⁹⁰Y, ⁴⁷Sc, ¹⁸⁶Re, ¹⁸⁸Re, ¹⁴²Pr, ¹⁰⁵Rh, ⁹⁷Ru; luminescent labels, such as luminol; and fluorescent labels, such as fluorescein and rhodamine, and biotin.

[0478] In addition to assaying levels of polypeptide of the present invention in a biological sample, proteins can also be detected in vivo by imaging. Antibody labels or markers for in vivo imaging of protein include those detectable by X-radiography, NMR or ESR. For X-radiography, suitable labels include radioisotopes such as barium or cesium, which emit detectable radiation but are not overtly harmful to the subject. Suitable markers for NMR and ESR include those with a detectable characteristic spin, such as deuterium, which may be incorporated into the antibody by labeling of nutrients for the relevant hybridoma.

[0479] A protein-specific antibody or antibody fragment which has been labeled with an appropriate detectable imaging moiety, such as a radioisotope (for example, ¹³¹I, ¹¹²In, ^{99m}Tc, (¹³¹I, ¹²⁵I, ¹²³I, ¹²¹I), carbon (¹⁴C), sulfur (³⁵S), tritium (³H), indium (^{115m}In, ^{113m}In, ¹¹²In, ¹¹¹In), and technetium (⁹⁹Tc, ^{99m}Tc), thallium (²⁰¹Ti), gallium (⁶⁸Ga, ⁶⁷Ga), palladium (¹⁰³Pd), molybdenum (⁹⁹Mo), xenon (¹³³Xe), fluorine (¹⁸F, ¹⁵³Sm, ¹⁷⁷Lu, ¹⁵⁹Gd, ¹⁴⁹Pm, ¹⁴⁰La, ¹⁷⁵Yb, ¹⁶⁶Ho, ⁹⁰Y, ⁴⁷Sc, ¹⁸⁶Re, ¹⁸⁸Re, ¹⁴²P, ¹⁰⁵Rh, ⁹⁷Ru), a radio-opaque substance, or a material detectable by nuclear magnetic resonance, is introduced (for example, parenterally, subcutaneously or intraperitoneally) into the mammal to be examined for immune system disorder. It will be understood in the art that the size of the subject and the imaging system used will determine the quantity of imaging moiety needed to produce diagnostic images. In the case of a radioisotope moiety, for a human subject, the quantity of radioactivity injected will normally range from about 5 to 20 millicuries of ^{99m}Tc. The labeled antibody or antibody fragment will then preferentially accumulate at the location of cells which express the polypeptide encoded by a polynucleotide of the invention. In vivo tumor imaging is described in S. W. Burchiel et al., “lmmunopharmacokinetics of Radiolabeled Antibodies and Their Fragments” (Chapter 13 in Tumor Imaging: The Radiochemical Detection of Cancer, S. W. Burchiel and B. A. Rhodes, eds., Masson Publishing Inc. (1982)).

[0480] In one embodiment, the invention provides a method for the specific delivery of compositions of the invention to cells by administering polypeptides of the invention (e.g., polypeptides encoded by polynucleotides of the invention and/or antibodies) that are associated with heterologous polypeptides or nucleic acids. In one example, the invention provides a method for delivering a therapeutic protein into the targeted cell. In another example, the invention provides a method for delivering a single stranded nucleic acid (e.g., antisense or ribozymes) or double stranded nucleic acid (e.g., DNA that can integrate into the cell's genome or replicate episomally and that can be transcribed) into the targeted cell.

[0481] In another embodiment, the invention provides a method for the specific destruction of cells (e.g., the destruction of tumor cells) by administering polypeptides of the invention in association with toxins or cytotoxic prodrugs.

[0482] By “toxin” is meant one or more compounds that bind and activate endogenous cytotoxic effector systems, radioisotopes, holotoxins, modified toxins, catalytic subunits of toxins, or any molecules or enzymes not normally present in or on the surface of a cell that under defined conditions cause the cell's death. Toxins that may be used according to the methods of the invention include, but are not limited to, radioisotopes known in the art, compounds such as, for example, antibodies (or complement fixing containing portions thereof) that bind an inherent or induced endogenous cytotoxic effector system, thyridine kinase, endonuclease, RNAse, alpha toxin, ricin, abrin, Pseudomonas exotoxin A, diphtheria toxin, saporin, momordin, gelonin, pokeweed antiviral protein, alpha-sarcin and cholera toxin. “Toxin” also includes a cytostatic or cytocidal agent, a therapeutic agent or a radioactive metal ion, e.g., alpha-emitters such as, for example, ²¹³Bi, or other radioisotopes such as, for example, ¹⁰³Pd, ¹³³Xe, ¹³¹I, ⁶⁸Ge, ⁵⁷Co, ⁶⁵Zn, ⁸⁵Sr, ³²P, ³⁵S, ⁹⁰Y, ¹⁵³Sm, ¹⁵³Gd, ¹⁶⁹Yb, ⁵¹Cr, ⁵⁴Mn, ⁷⁵Se, ¹¹³Sn, ⁹⁰Yttrium, ¹¹⁷Tin, ¹⁸⁶Rhenium, ¹⁶⁶Holmium, and ¹⁸⁸Rhenium; luminescent labels, such as luminol; and fluorescent labels, such as fluorescein and rhodamine, and biotin. In a specific embodiment, the invention provides a method for the specific destruction of cells (e.g., the destruction of tumor cells) by administering polypeptides of the invention or antibodies of the invention in association with the radioisotope ⁹⁰Y. In another specific embodiment, the invention provides a method for the specific destruction of cells (e.g., the destruction of tumor cells) by administering polypeptides of the invention or antibodies of the invention in association with the radioisotope ¹¹¹n. In a further specific embodiment, the invention provides a method for the specific destruction of cells (e.g., the destruction of tumor cells) by administering polypeptides of the invention or antibodies of the invention in association with the radioisotope ¹³¹I.

[0483] Techniques known in the art may be applied to label polypeptides of the invention (including antibodies). Such techniques include, but are not limited to, the use of bifunctional conjugating agents (see e.g., U.S. Pat. Nos. 5,756,065; 5,714,631; 5,696,239; 5,652,361; 5,505,931; 5,489,425; 5,435,990; 5,428,139; 5,342,604; 5,274,119; 4,994,560; and 5,808,003; the contents of each of which are hereby incorporated by reference in its entirety).

[0484] Thus, the invention provides a diagnostic method of a disorder, which involves (a) assaying the expression level of a polypeptide of the present invention in cells or body fluid of an individual; and (b) comparing the assayed polypeptide expression level with a standard polypeptide expression level, whereby an increase or decrease in the assayed polypeptide expression level compared to the standard expression level is indicative of a disorder. With respect to cancer, the presence of a relatively high amount of transcript in biopsied tissue from an individual may indicate a predisposition for the development of the disease, or may provide a means for detecting the disease prior to the appearance of actual clinical symptoms. A more definitive diagnosis of this type may allow health professionals to employ preventative measures or aggressive treatment earlier thereby preventing the development or further progression of the cancer.

[0485] Moreover, polypeptides of the present invention can be used to treat or prevent diseases or conditions such as, for example, neural disorders, immune system disorders, muscular disorders, reproductive disorders, gastrointestinal disorders, pulmonary disorders, cardiovascular disorders, renal disorders, proliferative disorders, and/or cancerous diseases and conditions. For example, patients can be administered a polypeptide of the present invention in an effort to replace absent or decreased levels of the polypeptide (e.g., insulin), to supplement absent or decreased levels of a different polypeptide (e.g., hemoglobin S for hemoglobin B, SOD, catalase, DNA repair proteins), to inhibit the activity of a polypeptide (e.g., an oncogene or tumor supressor), to activate the activity of a polypeptide (e.g., by binding to a receptor), to reduce the activity of a membrane bound receptor by competing with it for free ligand (e.g., soluble TNF receptors used in reducing inflammation), or to bring about a desired response (e.g., blood vessel growth inhibition, enhancement of the immune response to proliferative cells or tissues).

[0486] Similarly, antibodies directed to a polypeptide of the present invention can also be used to treat disease (as described supra, and elsewhere herein). For example, administration of an antibody directed to a polypeptide of the present invention can bind, and/or neutralize the polypeptide, and/or reduce overproduction of the polypeptide. Similarly, administration of an antibody can activate the polypeptide, such as by binding to a polypeptide bound to a membrane (receptor).

[0487] At the very least, the polypeptides of the present invention can be used as molecular weight markers on SDS-PAGE gels or on molecular sieve gel filtration columns using methods well known to those of skill in the art. Polypeptides can also be used to raise antibodies, which in turn are used to measure protein expression from a recombinant cell, as a way of assessing transformation of the host cell. Moreover, the polypeptides of the present invention can be used to test the biological activities described herein.

[0488] Diagnostic Assays

[0489] The compounds of the present invention are useful for diagnosis, treatment, prevention and/or prognosis of various disorders in mammals, preferably humans. Such disorders include, but are not limited to, those related to biological activities described in Table ID and, also as described herein under the section heading “Biological Activities”.

[0490] For a number of disorders, substantially altered (increased or decreased) levels of gene expression can be detected in tissues, cells or bodily fluids (e.g., sera, plasma, urine, semen, synovial fluid or spinal fluid) taken from an individual having such a disorder, relative to a “standard” gene expression level, that is, the expression level in tissues or bodily fluids from an individual not having the disorder. Thus, the invention provides a diagnostic method useful during diagnosis of a disorder, which involves measuring the expression level of the gene encoding the polypeptide in tissues, cells or body fluid from an individual and comparing the measured gene expression level with a standard gene expression level, whereby an increase or decrease in the gene expression level(s) compared to the standard is indicative of a disorder. These diagnostic assays may be performed in vivo or in vitro, such as, for example, on blood samples, biopsy tissue or autopsy tissue.

[0491] The present invention is also useful as a prognostic indicator, whereby patients exhibiting enhanced or depressed gene expression will experience a worse clinical outcome relative to patients expressing the gene at a level nearer the standard level.

[0492] In certain embodiments, a polypeptide of the invention, or polynucleotides, antibodies, agonists, or antagonists corresponding to that polypeptide, may be used to diagnose and/or prognosticate diseases and/or disorders associated with the tissue(s) in which the polypeptide of the invention is expressed, including one, two, three, four, five, or more tissues disclosed in Table 1B.2, column 5 (Tissue Distribution Library Code).

[0493] By “assaying the expression level of the gene encoding the polypeptide” is intended qualitatively or quantitatively measuring or estimating the level of the polypeptide of the invention or the level of the mRNA encoding the polypeptide of the invention in a first biological sample either directly (e.g., by determining or estimating absolute protein level or mRNA level) or relatively (e.g., by comparing to the polypeptide level or mRNA level in a second biological sample). Preferably, the polypeptide expression level or mRNA level in the first biological sample is measured or estimated and compared to a standard polypeptide level or mRNA level, the standard being taken from a second biological sample obtained from an individual not having the disorder or being determined by averaging levels from a population of individuals not having the disorder. As will be appreciated in the art, once a standard polypeptide level or mRNA level is known, it can be used repeatedly as a standard for comparison.

[0494] By “biological sample” is intended any biological sample obtained from an individual, cell fine, tissue culture, or other source containing polypeptides of the invention (including portions thereof) or mRNA. As indicated, biological samples include body fluids (such as sera, plasma, urine, synovial fluid and spinal fluid) and tissue sources found to express the full length or fragments thereof of a polypeptide or mRNA. Methods for obtaining tissue biopsies and body fluids from mammals are well known in the art. Where the biological sample is to include mRNA, a tissue biopsy is the preferred source.

[0495] Total cellular RNA can be isolated from a biological sample using any suitable technique such as the single-step guanidinium-thiocyanate-phenol-chloroform method described in Chomczynski and Sacchi, Anal. Biochem. 162:156-159 (1987). Levels of mRNA encoding the polypeptides of the invention are then assayed using any appropriate method. These include Northern blot analysis, S1 nuclease mapping, the polymerase chain reaction (PCR), reverse transcription in combination with the polymerase chain reaction (RT-PCR), and reverse transcription in combination with the ligase chain reaction (RT-LCR).

[0496] The present invention also relates to diagnostic assays such as quantitative and diagnostic assays for detecting levels of polypeptides of the invention, in a biological sample (e.g., cells and tissues), including determination of normal and abnormal levels of polypeptides. Thus, for instance, a diagnostic assay in accordance with the invention for detecting over-expression of polypeptides of the invention compared to normal control tissue samples may be used to detect the presence of tumors. Assay techniques that can be used to determine levels of a polypeptide, such as a polypeptide of the present invention in a sample derived from a host are well-known to those of skill in the art. Such assay methods include radioimmunoassays, competitive-binding assays, Western Blot analysis and ELISA assays. Assaying polypeptide levels in a biological sample can occur using any art-known method.

[0497] Assaying polypeptide levels in a biological sample can occur using antibody-based techniques. For example, polypeptide expression in tissues can be studied with classical immunohistological methods (Jalkanen et al., J. Cell. Biol. 101:976-985 (1985); Jalkanen, M., et al., J. Cell . Biol. 105:3087-3096 (1987)). Other antibody-based methods useful for detecting polypeptide gene expression include immunoassays, such as the enzyme linked immunosorbent assay (ELISA) and the radioimmunoassay (RIA). Suitable antibody assay labels are known in the art and include enzyme labels, such as, glucose oxidase, and radioisotopes, such as iodine (¹²⁵I, ¹²¹I), carbon (¹⁴C), sulfur (³⁵S), tritium (³H), indium (¹¹²In), and technetium (^{99m}Tc), and fluorescent labels, such as fluorescein and rhodamine, and biotin.

[0498] The tissue or cell type to be analyzed will generally include those which are known, or suspected, to express the gene of inteest (such as, for example, cancer). The protein isolation methods employed herein may, for example, be such as those described in Harlow and Lane (Harlow, E. and Lane, D., 1988, “Antibodies: A Laboratory Manual”, Cold Spring Harbor Laboratory Press, Cold Spring Harbor, N.Y.), which is incorporated herein by reference in its entirety. The isolated cells can be derived from cell culture or from a patient. The analysis of cells taken from culture may be a necessary step in the assessment of cells that could be used as part of a cell-based gene therapy technique or, alternatively, to test the effect of compounds on the expression of the gene.

[0499] For example, antibodies, or fragments of antibodies, such as those described herein, may be used to quantitatively or qualitatively detect the presence of gene products or conserved variants or peptide fragments thereof. This can be accomplished, for example, by immunofluorescence techniques employing a fluorescently labeled antibody coupled with light microscopic, flow cytometric, or fluorimetric detection.

[0500] In a preferred embodiment, antibodies, or fragments of antibodies directed to any one or all of the predicted epitope domains of the polypeptides of the invention (shown in column 7 of Table 1B.1) may be used to quantitatively or qualitatively detect the presence of gene products or conserved variants or peptide fragments thereof. This can be accomplished, for example, by immunofluorescence techniques employing a fluorescently labeled antibody coupled with light microscopic, flow cytometric, or fluorimetric detection.

[0501] In an additional preferred embodiment, antibodies, or fragments of antibodies directed to a conformational epitope of a polypeptide of the invention may be used to quantitatively or qualitatively detect the presence of gene products or conserved variants or peptide fragments thereof. This can be accomplished, for example, by immunofluorescence techniques employing a fluorescently labeled antibody coupled with light microscopic, flow cytometric, or fluorimetric detection.

[0502] The antibodies (or fragments thereof), and/or polypeptides of the present invention may, additionally, be employed histologically, as in immunofluorescence, immunoelectron microscopy or non-immunological assays, for in situ detection of gene products or conserved variants or peptide fragments thereof. In situ detection may be accomplished by removing a histological specimen from a patient, and applying thereto a labeled antibody or polypeptide of the present invention. The antibody (or fragment thereof) or polypeptide is preferably applied by overlaying the labeled antibody (or fragment) onto a biological sample. Through the use of such a procedure, it is possible to determine not only the presence of the gene product, or conserved variants or peptide fragments, or polypeptide binding, but also its distribution in the examined tissue. Using the present invention, those of ordinary skill will readily perceive that any of a wide variety of histological methods (such as staining procedures) can be modified in order to achieve such in situ detection.

[0503] Immunoassays and non-immunoassays for gene products or conserved variants or peptide fragments thereof will typically comprise incubating a sample, such as a biological fluid, a tissue extract, freshly harvested cells, or lysates of cells which have been incubated in cell culture, in the presence of a detectably labeled antibody capable of binding gene products or conserved variants or peptide fragments thereof, and detecting the bound antibody by any of a number of techniques well-known in the art.

[0504] The biological sample may be brought in contact with and immobilized onto a solid phase support or carrier such as nitrocellulose, or other solid support which is capable of immobilizing cells, cell particles or soluble proteins. The support may then be washed with suitable buffers followed by treatment with the detectably labeled antibody or detectable polypeptide of the invention. The solid phase support may then be washed with the buffer a second time to remove unbound antibody or polypeptide. Optionally the antibody is subsequently labeled. The amount of bound label on solid support may then be detected by conventional means.

[0505] By “solid phase support or carrier” is intended any support capable of binding an antigen or an antibody. Well-known supports or carriers include glass, polystyrene, polypropylene, polyethylene, dextran, nylon, amylases, natural and modified celluloses, polyacrylamides, gabbros, and magnetite. The nature of the carrier can be either soluble to some extent or insoluble for the purposes of the present invention. The support material may have virtually any possible structural configuration so long as the coupled molecule is capable of binding to an antigen or antibody. Thus, the support configuration may be spherical, as in a bead, or cylindrical, as in the inside surface of a test tube, or the external surface of a rod. Alternatively, the surface may be flat such as a sheet, test strip, etc. Preferred supports include polystyrene beads. Those skilled in the art will know many other suitable carriers for binding antibody or antigen, or will be able to ascertain the same by use of routine experimentation.

[0506] The binding activity of a given lot of antibody or antigen polypeptide may be determined according to well known methods. Those skilled in the art will be able to determine operative and optimal assay conditions for each determination by employing routine experimentation.

[0507] In addition to assaying polypeptide levels or polynucleotide levels in a biological sample obtained from an individual, polypeptide or polynucleotide can also be detected in vivo by imaging. For example, in one embodiment of the invention, polypeptides and/or antibodies of the invention are used to image diseased cells, such as neoplasms. In another embodiment, polynucleotides of the invention (e.g., polynucleotides complementary to all or a portion of an mRNA) and/or antibodies (e.g., antibodies directed to any one or a combination of the epitopes of a polypeptide of the invention, antibodies directed to a conformational epitope of a polypeptide of the invention, or antibodies directed to the full length polypeptide expressed on the cell surface of a mammalian cell) are used to image diseased or neoplastic cells.

[0508] Antibody labels or markers for in vivo imaging of polypeptides of the invention include those detectable by X-radiography, NMR, MRI, CAT-scans or ESR. For X-radiography, suitable labels include radioisotopes such as barium or cesium, which emit detectable radiation but are not overtly harmful to the subject. Suitable markers for NMR and ESR include those with a detectable characteristic spin, such as deuterium, which may be incorporated into the antibody by labeling of nutrients for the relevant hybridoma. Where in vivo imaging is used to detect enhanced levels of polypeptides for diagnosis in humans, it may be preferable to use human antibodies or “humanized” chimeric monoclonal antibodies. Such antibodies can be produced using techniques described herein or otherwise known in the art. For example methods for producing chimeric antibodies are known in the art. See, for review, Morrison, Science 229:1202 (1985); Oi et al., BioTechniques 4:214 (1986); Cabilly et al., U.S. Pat. No. 4,816,567; Taniguchi et al., EP 171496; Morrison et al., EP 173494; Neuberger et al., WO 8601533; Robinson et al., WO 8702671; Boulianne et al., Nature 312:643 (1984); Neuberger et al., Nature 314:268 (1985).

[0509] Additionally, any polypeptides of the invention whose presence can be detected, can be administered. For example, polypeptides of the invention labeled with a radio-opaque or other appropriate compound can be administered and visualized in vivo, as discussed, above for labeled antibodies. Further, such polypeptides can be utilized for in vitro diagnostic procedures.

[0510] A polypeptide-specific antibody or antibody fragment which has been labeled with an appropriate detectable imaging moiety, such as a radioisotope (for example, ¹³¹I, ¹¹²In, ^{99m}Tc), a radio-opaque substance, or a material detectable by nuclear magnetic resonance, is introduced (for example, parenterally, subcutaneously or intraperitoneally) into the mammal to be examined for a disorder. It will be understood in the art that the size of the subject and the imaging system used will determine the quantity of imaging moiety needed to produce diagnostic images. In the case of a radioisotope moiety, for a human subject, the quantity of radioactivity injected will normally range from about 5 to 20 millicuries of ^{99m}Tc. The labeled antibody or antibody fragment will then preferentially accumulate at the location of cells which contain the antigenic protein. In vivo tumor imaging is described in S. W. Burchiel et al., “Immunopharmacokinetics of Radiolabeled Antibodies and Their Fragments” (Chapter 13 in Tumor Imaging: The Radiochemical Detection of Cancer, S. W. Burchiel and B. A. Rhodes, eds., Masson Publishing Inc. (1982)).

[0511] With respect to antibodies, one of the ways in which an antibody of the present invention can be detectably labeled is by linking the same to a reporter enzyme and using the linked product in an enzyme immunoassay (EIA) (Voller, A., “The Enzyme Linked Immunosorbent Assay (ELISA)”, 1978, Diagnostic Horizons 2:1-7, Microbiological Associates Quarterly Publication, Walkersville, Md.); Voller et al., J. Clin. Pathol. 31:507-520 (1978); Butler, J. E., Meth. Enzymol. 73:482-523 (1981); Maggio, E. (ed.), 1980, Enzyme lmmunoassay, CRC Press, Boca Raton, Fla.,; Ishikawa, E. et al., (eds.), 1981, Enzyme Immunoassay, Kgaku Shoin, Tokyo). The reporter enzyme which is bound to the antibody will react with an appropriate substrate, preferably a chromogenic substrate, in such a manner as to produce a chemical moiety which can be detected, for example, by spectrophotometric, fluorimetric or by visual means. Reporter enzymes which can be used to detectably label the antibody include, but are not limited to, malate dehydrogenase, staphylococcal nuclease, delta-5-steroid isomerase, yeast alcohol dehydrogenase, alpha-glycerophosphate, dehydrogenase, triose phosphate isomerase, horseradish peroxidase, alkaline phosphatase, asparaginase, glucose oxidase, beta-galactosidase, ribonuclease, urease, catalase, glucose-6-phosphate dehydrogenase, glucoamylase and acetylcholinesterase. Additionally, the detection can be accomplished by calorimetric methods which employ a chromogenic substrate for the reporter enzyme. Detection may also be accomplished by visual comparison of the extent of enzymatic reaction of a substrate in comparison with similarly prepared standards.

[0512] Detection may also be accomplished using any of a variety of other immunoassays. For example, by radioactively labeling the antibodies or antibody fragments, it is possible to detect polypeptides through the use of a radioimmunoassay (RIA) (see, for example, Weintraub, B., Principles of Radioimmunoassays, Seventh Training Course on Radioligand Assay Techniques, The Endocrine Society, March, 1986, which is incorporated by reference herein). The radioactive isotope can be detected by means including, but not limited to, a gamma counter, a scintillation counter, or autoradiography.

[0513] It is also possible to label the antibody with a fluorescent compound. When the fluorescently labeled antibody is exposed to light of the proper wave length, its presence can then be detected due to fluorescence. Among the most commonly used fluorescent labeling compounds are fluorescein isothiocyanate, rhodamine, phycoerythrin, phycocyanin, allophycocyanin, ophthaldehyde and fluorescamine.

[0514] The antibody can also be detectably labeled using fluorescence emitting metals such as ¹⁵²Eu, or others of the lanthanide series. These metals can be attached to the antibody using such metal chelating groups as diethylenetriaminepentacetic acid (DTPA) or ethylenediaminetetraacetic acid (EDTA).

[0515] The antibody also can be detectably labeled by coupling it to a chemiluminescent compound. The presence of the chemiluminescent-tagged antibody is then determined by detecting the presence of luminescence that arises during the course of a chemical reaction. Examples of particularly useful chemiluminescent labeling compounds are luminol, isoluminol, theromatic acridinium ester, imidazole, acridinium salt and oxalate ester.

[0516] Likewise, a bioluminescent compound may be used to label the antibody of the present invention. Bioluminescence is a type of chemiluminescence found in biological systems in, which a catalytic protein increases the efficiency of the chemiluminescent reaction. The presence of a bioluminescent protein is determined by detecting the presence of luminescence. Important bioluminescent compounds for purposes of labeling are luciferin, luciferase and aequorin.

[0517] Methods for Detecting Diseases

[0518] In general, a disease may be detected in a patient based on the presence of one or more proteins of the invention and/or polynucleotides encoding such proteins in a biological sample (for example, blood, sera, urine, and/or tumor biopsies) obtained from the patient. In other words, such proteins may be used as markers to indicate the presence or absence of a disease or disorder, including cancer and/or as described elsewhere herein. In addition, such proteins may be useful for the detection of other diseases and cancers. The binding agents provided herein generally permit detection of the level of antigen that binds to the agent in the biological sample. Polynucleotide primers and probes may be used to detect the level of mRNA encoding polypeptides of the invention, which is also indicative of the presence or absence of a disease or disorder, including cancer. In general, polypeptides of the invention should be present at a level that is at least three fold higher in diseased tissue than in normal tissue.

[0519] There are a variety of assay formats known to those of ordinary skill in the art for using a binding agent to detect polypeptide markers in a sample. See, e.g., Harlow and Lane, supra In general, the presence or absence of a disease in a patient may be determined by (a) contacting a biological sample obtained from a patient with a binding agent; (b) detecting in the sample a level of polypeptide that binds to the binding agent; and (c) comparing the level of polypeptide with a predetermined cut-off value.

[0520] In a preferred embodiment, the assay involves the use of a binding agent(s) immobilized on a solid support to bind to and remove the polypeptide of the invention from the remainder of the sample. The bound polypeptide may then be detected using a detection reagent that contains a reporter group and specifically binds to the binding agent/polypeptide complex. Such detection reagents may comprise, for example, a binding agent that specifically binds to the polypeptide or an antibody or other agent that specifically binds to the binding agent, such as an anti-immunoglobulin, protein G, protein A or a lectin. Alternatively, a competitive assay may be utilized, in which a polypeptide is labeled with a reporter group and allowed to bind to the immobilized binding agent after incubation of the binding agent with the sample. The extent to which components of the sample inhibit the binding of the labeled polypeptide to the binding agent is indicative of the reactivity of the sample with the immobilized binding agent. Suitable polypeptides for use within such assays include polypeptides of the invention and portions thereof, or antibodies, to which the binding agent binds, as described above.

[0521] The solid support may be any material known to those of skill in the art to which polypeptides of the invention may be attached. For example, the solid support may be a test well in a microtiter plate or a nitrocellulose or other suitable membrane. Alternatively, the support may be a bead or disc, such as glass fiberglass, latex or a plastic material such as polystyrene or polyvinylchloride. The support may also be a magnetic particle or a fiber optic sensor, such as those disclosed, for example, in U.S. Pat. No. 5,359,681. The binding agent may be immobilized on the solid support using a variety of techniques known to those of skill in the art, which are amply described in the patent and scientific literature. In the context of the present invention, the term “immobilization” refers to both noncovalent association, such as adsorption, and covalent attachment (which may be a direct linkage between the agent and functional groups on the support or may be a linkage by way of a crossinking agent). Immobilization by adsorption to a well in a microtiter plate or to a membrane is preferred. In such cases, adsorption may be achieved by contacting the binding agent, in a suitable buffer, with the solid support for the suitable amount of time. The contact time varies with temperature, but is typically between about 1 hour and about 1 day. In general, contacting a well of plastic microtiter plate (such as polystyrene or polyvinylchloride) with an amount of binding agent ranging from about 10 ng to about 10 ug, and preferably about 100 ng to about 1 ug, is sufficient to immobilize an adequate amount of binding agent.

[0522] Covalent attachment of binding agent to a solid support may generally be achieved by first reacting the support with a bifunctional reagent that will react with both the support and a functional group, such as a hydroxyl or amino group, on the binding agent. For example, the binding agent may be covalently attached to supports having an appropriate polymer coating using benzoquinone or by condensation of an aldehyde group on the support with an amine and an active hydrogen on the binding partner (see, e.g., Pierce Immunotechnology Catalog and Handbook, 1991, at A12-A13).

[0523] Gene Therapy Methods

[0524] Also encompassed by the invention are gene therapy methods for treating or preventing disorders, diseases and conditions. The gene therapy methods relate to the introduction of nucleic acid (DNA, RNA and antisense DNA or RNA) sequences into an animal to achieve expression of the polypeptide of the present invention. This method requires a polynucleotide which codes for a polypeptide of the present invention operatively linked to a promoter and any other genetic elements necessary for the expression of the polypeptide by the target tissue. Such gene therapy and delivery techniques are known in the art, see, for example, WO90/11092, which is herein incorporated by reference.

[0525] Thus, for example, cells from a patient may be engineered with a polynucleotide (DNA or RNA) comprising a promoter operably linked to a polynucleotide of the present invention ex vivo, with the engineered cells then being provided to a patient to be treated with the polypeptide of the present invention. Such methods are well-known in the art. For example, see Beildegrun, A., et al., J. Natl. Cancer Inst. 85: 207-216 (1993); Ferrantini, M. et al., Cancer Research 53: 1107-1112 (1993); Ferrantini, M. et al., J. Immunology 153: 4604-4615 (1994); Kaido, T., et al., Int. J. Cancer 60: 221-229 (1995); Ogura, H., et al., Cancer Research 50: 5102-5106 (1990); Santodonato, L., et al., Human Gene Therapy 7:1-10 (1996); Santodonato, L., et al., Gene Therapy 4:1246-1255 (1997); and Zhang, J.-F. et al., Cancer Gene Therapy 3: 31-38 (1996)), which are herein incorporated by reference. In one embodiment, the cells which are engineered are arterial cells. The arterial cells may be reintroduced into the patient through direct injection to the artery, the tissues surrounding the artery, or through catheter injection.

[0526] As discussed in more detail below, the polynucleotide constructs can be delivered by any method that delivers injectable materials to the cells of an animal, such as, injection into the interstitial space of tissues (heart, muscle, skin, lung, liver, and the like). The polynucleotide constructs may be delivered in a pharmaceutically acceptable liquid or aqueous carrier.

[0527] In one embodiment, the polynucleotide of the present invention is delivered as a naked polynucleotide. The term “naked” polynucleotide, DNA or RNA refers to sequences that are free from any delivery vehicle that acts to assist, promote or facilitate entry into the cell, including viral sequences, viral particles, liposome formulations, lipofectin or precipitating agents and the like. However, the polynucleotide of the present invention can also be delivered in liposome formulations and lipofectin formulations and the like can be prepared by methods well known to those skilled in the art. Such methods are described, for example, in U.S. Pat. Nos. 5,593,972, 5,589,466, and 5,580,859, which are herein incorporated by reference.

[0528] The polynucleotide vector constructs used in the gene therapy method are preferably constructs that will not integrate into the host genome nor will they contain sequences that allow for replication. Appropriate vectors include pWLNEO, pSV2CAT, pOG44, pXT1 and pSG available from Stratagene; pSVK3, pBPV, pMSG and pSVL available from Pharmacia; and pEF1/V5, pcDNA3.1, and pRc/CMV2 available from Invitrogen. Other suitable vectors will be readily apparent to the skilled artisan.

[0529] Any strong promoter known to those skilled in the art can be used for driving the expression of the polynucleotide sequence. Suitable promoters include adenoviral promoters, such as the adenoviral major late promoter; or heterologous promoters, such as the cytomegalovirus (CMV) promoter; the respiratory syncytial virus (RSV) promoter; inducible promoters, such as the MMT promoter, the metallothionein promoter; heat shock promoters; the albumin promoter; the ApoAI promoter; human globin promoters; viral thymidine kinase promoters, such as the Herpes Simplex thymidine kinase promoter; retroviral LTRs; the b-actin promoter; and human growth hormone promoters. The promoter also may be the native promoter for the polynucleotide of the present invention.

[0530] Unlike other gene therapy techniques, one major advantage of introducing naked nucleic acid sequences into target cells is the transitory nature of the polynucleotide synthesis in the cells. Studies have shown that non-replicating DNA sequences can be introduced into cells to provide production of the desired polypeptide for periods of up to six months.

[0531] The polynucleotide construct can be delivered to the interstitial space of tissues within the an animal, including of muscle, skin, brain, lung, liver, spleen, bone marrow, thymus, heart, lymph, blood, bone, cartilage, pancreas, kidney, gall bladder, stomach, intestine, testis, ovary, uterus, rectum, nervous system, eye, gland, and connective tissue. Interstitial space of the tissues comprises the intercellular, fluid, mucopolysaccharide matrix among the reticular fibers of organ tissues, elastic fibers in the walls of vessels or chambers, collagen fibers of fibrous tissues, or that same matrix within connective tissue ensheathing muscle cells or in the lacunae of bone. It is similarly the space occupied by the plasma of the circulation and the lymph fluid of the lymphatic channels. Delivery to the interstitial space of muscle tissue is preferred for the reasons discussed below. They may be conveniently delivered by injection into the tissues comprising these cells. They are preferably delivered to and expressed in persistent, non-dividing cells which are differentiated, although delivery and expression may be achieved in non-differentiated or less completely differentiated cells, such as, for example, stem cells of blood or skin fibroblasts. In vivo muscle cells are particularly competent in their ability to take up and express polynucleotides.

[0532] For the naked nucleic acid sequence injection, an effective dosage amount of DNA or RNA will be in the range of from about 0.05 mg/kg body weight to about 50 mg/kg body weight. Preferably the dosage will be from about 0.005 mg/kg to about 20 mg/kg and more preferably from about 0.05 mg/kg to about 5 mg/kg. Of course, as the artisan of ordinary skill will appreciate, this dosage will vary according to the tissue site of injection. The appropriate and effective dosage of nucleic acid sequence can readily be determined by those of ordinary skill in the art and may depend on the condition being treated and the route of administration.

[0533] The preferred route of administration is by the parenteral route of injection into the interstitial space of tissues. However, other parenteral routes may also be used, such as, inhalation of an aerosol formulation particularly for delivery to lungs or bronchial tissues, throat or mucous membranes of the nose. In addition, naked DNA constructs can be delivered to arteries during angioplasty by the catheter used in the procedure.

[0534] The naked polynucleotides are delivered by any method known in the art, including, but not limited to, direct needle injection at the delivery site, intravenous injection, topical administration, catheter infusion, and so-called “gene guns”. These delivery methods are known in the art.

[0535] The constructs may also be delivered with delivery vehicles such as viral sequences, viral particles, liposome formulations, lipofectin, precipitating agents, etc. Such methods of delivery are known in the art.

[0536] In certain embodiments, the polynucleotide constructs are complexed in a liposome preparation. Liposomal preparations for use in the instant invention include cationic (positively charged), anionic (negatively charged) and neutral preparations. However, cationic liposomes are particularly preferred because a tight charge complex can be formed between the cationic liposome and the polyanionic nucleic acid. Cationic liposomes have been shown to mediate intracellular delivery of plasmid DNA (Felgner et al., Proc. Natl. Acad. Sci. USA (1987) 84:7413-7416, which is herein incorporated by reference); mRNA (Malone et al., Proc. Natl. Acad. Sci. USA (1989) 86:6077-6081, which is herein incorporated by reference); and purified transcription factors (Debs et al., J. Biol. Chem. (1990) 265:10189-10192, which is herein incorporated by reference), in functional form.

[0537] Cationic liposomes are readily available. For example, N[1-2,3-dioleyloxy)propyl]-N,N,N-triethylanmmonium (DOTMA) liposomes are particularly useful and are available under the trademark Lipofectin, from GIBCO BRL, Grand Island, N.Y. (See, also, Felgner et al., Proc. Natl Acad. Sci. USA (1987) 84:7413-7416, which is herein incorporated by reference). Other commercially available liposomes include transfectace (DDAB/DOPE) and DOTAP/DOPE (Boehringer).

[0538] Other cationic liposomes can be prepared from readily available materials using techniques well known in the art. See, e.g. PCI Publication No. WO 90/11092 (which is herein incorporated by reference) for a description of the synthesis of DOTAP (1,2-bis(oleoyloxy)-3-(trimethylammonio)propane) liposomes. Preparation of DOTMA liposomes is explained in the literature, see, e.g., P. Felgner et al., Proc. Natl. Acad. Sci. USA 84:7413-7417, which is herein incorporated by reference. Similar methods can be used to prepare liposomes from other cationic lipid materials.

[0539] Similarly, anionic and neutral liposomes are readily available, such as from Avanti Polar Lipids (Birmingham, Ala.), or can be easily prepared using readily available materials. Such materials include phosphatidyl, choline, cholesterol, phosphatidyl ethanolamine, dioleoylphosphatidyl choline (DOPC), dioleoylphosphatidyl glycerol (DOPG), dioleoylphoshatidyl ethanolamine (DOPE), among others. These materials can also be mixed with the DOTMA and DOTAP starting materials in appropriate ratios. Methods for making liposomes using these materials are well known in the art.

[0540] For example, commercially dioleoylphosphatidyl choline (DOPC), dioleoylphosphatidyl glycerol (DOPG), and dioleoylphosphatidyl ethanolamine (DOPE) can be used in various combinations to make conventional liposomes, with or without the addition of cholesterol. Thus, for example, DOPG/DOPC vesicles can be prepared by drying 50 mg each of DOPG and DOPC under a stream of nitrogen gas into a sonication vial. The sample is placed under a vacuum pump overnight and is hydrated the following day with deionized water. The sample is then sonicated for 2 hours in a capped vial, using a Heat Systems model 350 sonicator equipped with an inverted cup (bath type) probe at the maximum setting while the bath is circulated at 15EC. Alternatively, negatively charged vesicles can be prepared without sonication to produce multilamellar vesicles or by extrusion through nucleopore membranes to produce unilamellar vesicles of discrete size. Other methods are known and available to those of skill in the art.

[0541] The liposomes can comprise multilamellar vesicles (MLVs), small unilamellar vesicles (SUVs), or large unilamellar vesicles (LUVs), with SUVs being preferred. The various liposome-nucleic acid complexes are prepared using methods well known in the art. See, e.g., Straubinger et al., Methods of Immunology (1983), 101:512-527, which is herein incorporated by reference. For example, NLVs containing nucleic acid can be prepared by depositing a thin film of phospholipid on the walls of a glass tube and subsequently hydrating with a solution of the material to be encapsulated. SUVs are prepared by extended sonication of MLVs to produce a homogeneous population of unilamellar liposomes. The material to be entrapped is added to a suspension of preformed MLVs and then sonicated. When using liposomes containing cationic lipids, the dried lipid film is resuspended in an appropriate solution such as sterile water or an isotonic buffer solution such as 10 mM Tris/NaCl, sonicated, and then the preformed liposomes are mixed directly with the DNA. The liposome and DNA form a very stable complex due to binding of the positively charged liposomes to the cationic DNA. SUVs find use with small nucleic acid fragments. LUVs are prepared by a number of methods, well known in the art. Commonly used methods include Ca²⁺-EDTA chelation (Papahadjopoulos et al., Biochim. Biophys. Acta (1975) 394:483; Wilson et al., Cell 17:77 (1979)); ether injection (Deamer, D. and Bangharn, A., Biochim. Biophys. Acta 443:629 (1976); Ostro et al., Biochem. Biophys. Res. Commun. 76:836 (1977); Fraley et al., Proc. Natl. Acad. Sci. USA 76:3348 (1979)); detergent dialysis (Enoch, H. and Strittmatter, P., Proc. Natl. Acad. Sci. USA 76:145 (1979)); and reverse-phase evaporation (REV) (Fraley et al., J. Biol. Chem. 255:10431 (1980); Szoka, F. and Papahadjopoulos, D., Proc. Natl. Acad. Sci. USA 75:145 (1978); Schaefer-Ridder et al., Science 215:166 (1982)), which are herein incorporated by reference.

[0542] Generally, the ratio of DNA to liposomes will be from about 10:1 to about 1:10. Preferably, the ration will be from about 5:1 to about 1:5. More preferably, the ration will be about 3:1 to about 1:3. Still more preferably, the ratio will be about 1:1.

[0543] U.S. Pat. No. 5,676,954 (which is herein incorporated by reference) reports on the injection of genetic material, complexed with cationic liposomes carriers, into mice. U.S. Pat. Nos. 4,897,355, 4,946,787, 5,049,386, 5,459,127, 5,589,466, 5,693,622, 5,580,859, 5,703,055, and international publication no. WO 94/9469 (which are herein incorporated by reference) provide cationic lipids for use in transfecting DNA into cells and mammals. U.S. Pat. Nos. 5,589,466, 5,693,622, 5,580,859, 5,703,055, and international publication no. WO 94/9469 provide methods for delivering DNA-cationic lipid complexes to mammals.

[0544] In certain embodiments, cells are engineered, ex vivo or in vivo, using a retroviral particle containing RNA which comprises a sequence encoding a polypeptide of the present invention. Retroviruses from which the retroviral plasmid vectors may be derived include, but are not limited to, Moloney Murine Leukemia Virus, spleen necrosis virus, Rous sarcoma Virus, Harvey Sarcoma Virus, avian leukosis virus, gibbon ape leukemia virus, human immunodeficiency virus, Myeloproliferative Sarcoma Virus, and mammary tumor virus.

[0545] The retroviral plasmid vector is employed to transduce packaging cell lines to form producer cell lines. Examples of packaging cells which may be transfected include, but are not limited to, the PE501, PA317, R-2, R-AM, PA12, T19-14X, VT-19-17-H2, RCRE, RCRIP, GP+E-86, GP+envAm12, and DAN cell lines as described in Miller, Human Gene Therapy 1:5-14 (1990), which is incorporated herein by reference in its entirety. The vector may transduce the packaging cells through any means known in the art. Such means include, but are not limited to, electroporation, the use of liposomes, and CaPO₄ precipitation. In one alternative, the retroviral plasmid vector may be encapsulated into a liposome, or coupled to a lipid, and then administered to a host.

[0546] The producer cell line generates infectious retroviral vector particles which include polynucleotide encoding a polypeptide of the present invention. Such retroviral vector particles then may be employed, to transduce eukaryotic cells, either in vitro or in vivo. The transduced eukaryotic cells will express a polypeptide of the present invention.

[0547] In certain other embodiments, cells are engineered, ex vivo or in vivo, with polynucleotide contained in an adenovirus vector. Adenovirus can be manipulated such that it encodes and expresses a polypeptide of the present invention, and at the same time is inactivated in terms of its ability to replicate in a normal lytic viral life cycle. Adenovirus expression is achieved without integration of the viral DNA into the host cell chromosome, thereby alleviating concerns about insertional mutagenesis. Furthermore, adenoviruses have been used as live enteric vaccines for many years with an excellent safety profile (Schwartz et al. Am. Rev. Respir. Dis.109:233-238 (1974)). Finally, adenovirus mediated gene transfer has been demonstrated in a number of instances including transfer of alpha-1-antitrypsin and CFTR to the lungs of cotton rats (Rosenfeld, M. A. et al. (1991) Science 252:431-434; Rosenfeld et al., (1992) Cell 68:143-155). Furthermore, extensive studies to attempt to establish adenovirus as a causative agent in human cancer were uniformly negative (Green, M. et al. (1979) Proc. Natl. Acad. Sci. USA 76:6606).

[0548] Suitable adenoviral vectors useful in the present invention are described, for example, in Kozarsky and Wilson, Curr. Opin. Genet. Devel. 3:499-503 (1993); Rosenfeld et al., Cell 68:143-155 (1992); Engelhardt et al., Human Genet. Ther. 4:759-769 (1993); Yang et al., Nature Genet. 7:362-369 (1994); Wilson et al., Nature 365:691-692 (1993); and U.S. Pat. No. 5,652,224, which are herein incorporated by reference. For example, the adenovirus vector Ad2 is useful and can be grown in human 293 cells. These cells contain the E1 region of adenovirus and constitutively express Ela and Elb, which complement the defective adenoviruses by providing the products of the genes deleted from the vector. In addition to Ad2, other varieties of adenovirus (e.g., Ad3, Ad5, and Ad7) are also useful in the present invention.

[0549] Preferably, the adenoviruses used in the present invention are replication deficient. Replication deficient adenoviruses require the aid of a helper virus and/or packaging cell line to form infectious particles. The resulting virus is capable of infecting cells and can express a polynucleotide of interest which is operably linked to a promoter, but cannot replicate in most cells. Replication deficient adenoviruses may be deleted in one or more of all or a portion of the following genes: E1a, E1b, E3, E4, E2a, or L1 through L5.

[0550] In certain other embodiments, the cells are engineered, ex vivo or in vivo, using an adeno-associated virus (AAV). AAVs are naturally occurring defective viruses that require helper viruses to produce infectious particles (Muzyczka, N., Curr. Topics in Microbiol. Immunol. 158:97 (1992)). It is also one of the few viruses that may integrate its DNA into non-dividing cells. Vectors containing as little as 300 base pairs of AAV can be packaged and can integrate, but space for exogenous DNA is limited to about 4.5 kb. Methods for producing and using such AAVs are known in the art. See, for example, U.S. Pat. Nos. 5,139,941, 5,173,414, 5,354,678, 5,436,146, 5,474,935, 5,478,745, and 5,589,377.

[0551] For example, an appropriate AAV vector for use in the present invention will include all the sequences necessary for DNA replication, encapsidation, and host-cell integration. The polynucleotide construct is inserted into the AAV vector using standard cloning methods, such as those found in Sambrook et al., Molecular Cloning: A Laboratory Manual, Cold Spring Harbor Press (1989). The recombinant AAV vector is then transfected into packaging cells which are infected with a helper virus, using any standard technique, including lipofection, electroporation, calcium phosphate precipitation, etc. Appropriate helper viruses include adenoviruses, cytomegaloviruses, vaccinia viruses, or herpes viruses. Once the packaging cells are transfected and infected, they will produce infectious AAV viral particles which contain the polynucleotide construct. These viral particles are then used to transduce eukaryotic cells, either ex vivo or in vivo. The transduced cells will contain the polynucleotide construct integrated into its genome, and will express a polypeptide of the invention.

[0552] Another method of gene therapy involves operably associating heterologous control regions and endogenous polynucleotide sequences (e.g. encoding a polypeptide of the present invention) via homologous recombination (see, e.g., U.S. Pat. No. 5,641,670, issued Jun. 24, 1997; International Publication No. WO 96/29411, published Sep. 26, 1996; International Publication No. WO 94/12650, published Aug. 4, 1994; Koller et al., Proc. Natl. Acad. Sci. USA 86:8932-8935 (1989); and Zijlstra et al., Nature 342:435-438 (1989), which are herein encorporated by reference. This method involves the activation of a gene which is present in the target cells, but which is not normally expressed in the cells, or is expressed at a lower level than desired.

[0553] Polynucleotide constructs are made, using standard techniques known in the art, which contain the promoter with targeting sequences flanking the promoter. Suitable promoters are described herein. The targeting sequence is sufficiently complementary to an endogenous sequence to permit homologous recombination of the promotertargeting sequence with the endogenous sequence. The targeting sequence will be sufficiently near the 5′ end of the desired endogenous polynucleotide sequence so the promoter will be operably linked to the endogenous sequence upon homologous recombination.

[0554] The promoter and the targeting sequences can be amplified using PCR. Preferably, the amplified promoter contains distinct restriction enzyme sites on the 5′ and 3′ ends. Preferably, the 3′ end of the first targeting sequence contains the same restriction enzyme site as the 5′ end of the amplified promoter and the 5′ end of the second targeting sequence contains the same restriction site as the 3′ end of the amplified promoter. The amplified promoter and targeting sequences are digested and ligated together.

[0555] The promoter-targeting sequence construct is delivered to the cells, either as naked polynucleotide, or in conjunction with transfection-facilitating agents, such as liposomes, viral sequences, viral particles, whole viruses, lipofection, precipitating agents, etc., described in more detail above. The P promoter-targeting sequence can be delivered by any method, included direct needle injection, intravenous injection, topical administration, catheter infusion, particle accelerators, etc. The methods are described in more detail below.

[0556] The promoter-targeting sequence construct is taken up by cells. Homologous recombination between the construct and the endogenous sequence takes place, such that an endogenous sequence is placed under the control of the promoter. The promoter then drives the expression of the endogenous sequence.

[0557] The polynucleotide encoding a polypeptide of the present invention may contain a secretory signal sequence that facilitates secretion of the protein. Typically, the signal sequence is positioned in the coding region of the polynucleotide to be expressed towards or at the 5′ end of the coding region. The signal sequence may be homologous or heterologous to the polynucleotide of interest and may be homologous or heterologous to the cells to be transfected. Additionally, the signal sequence may be chemically synthesized using methods known in the art.

[0558] Any mode of administration of any of the above-described polynucleotides constructs can be used so long as the mode results in the expression of one or more molecules in an amount sufficient to provide a therapeutic effect. This includes direct needle injection, systemic injection, catheter infusion, biolistic injectors, particle accelerators (i.e., “gene guns”), gelfoam sponge depots, other commercially available depot materials, osmotic pumps (e.g., Alza minipumps), oral or suppositorial solid (tablet or pill) pharmaceutical formulations, and decanting or topical applications during surgery. For example, direct injection of naked calcium phosphate-precipitated plasmid into rat liver and rat spleen or a protein-coated plasmid into the portal vein has resulted in gene expression of the foreign gene in the rat livers (Kaneda et al., Science 243:375 (1989)).

[0559] A preferred method of local administration is by direct injection. Preferably, a recombinant molecule of the present invention complexed with a delivery vehicle is administered by direct injection into or locally within the area of arteries. Administration of a composition locally within the area of arteries refers to injecting the composition centimeters and preferably, millimeters within arteries.

[0560] Another method of local administration is to contact a polynucleotide construct of the present invention in or around a surgical wound. For example, a patient can undergo surgery and the polynucleotide construct can be coated on the surface of tissue inside the wound or the construct can be injected into areas of tissue inside the wound.

[0561] Therapeutic compositions useful in systemic administration, include recombinant molecules of the present invention complexed to a targeted delivery vehicle of the present invention. Suitable delivery vehicles for use with systemic administration comprise liposomes comprising ligands for targeting the vehicle to a particular site. In specific embodiments, suitable delivery vehicles for use with systemic administration comprise liposomes comprising polypeptides of the invention for targeting the vehicle to a particular site.

[0562] Preferred methods of systemic administration, include intravenous injection, aerosol, oral and percutaneous (topical) delivery. Intravenous injections can be performed using methods standard in the art. Aerosol delivery can also be performed using methods standard in the art (see, for example, Stribling et al., Proc. Natl. Acad. Sci. USA 189:11277-11281, 1992, which is incorporated herein by reference). Oral delivery can be performed by complexing a polynucleotide construct of the present invention to a carrier capable of withstanding degradation by digestive enzymes in the gut of an animal. Examples of such carriers, include plastic capsules or tablets, such as those known in the art. Topical delivery can be performed by mixing a polynucleotide construct of the present invention with a lipophilic reagent (e.g., DMSO) that is capable of passing into the skin.

[0563] Determining an effective amount of substance to be delivered can depend upon a number of factors including, for example, the chemical structure and biological activity of the substance, the age and weight of the animal, the precise condition requiring treatment and its severity, and the route of administration. The frequency of treatments depends upon a number of factors, such as the amount of polynucleotide constructs administered per dose, as well as the health and history of the subject. The precise amount, number of doses, and timing of doses will be determined by the attending physician or veterinarian.

[0564] Therapeutic compositions of the present invention can be administered to any animal, preferably to mammals and birds. Preferred manuals include humans, dogs, cats, mice, rats, rabbits sheep, cattle, horses and pigs, with humans being particularly preferred.

[0565] Biological Activities

[0566] Polynucleotides or polypeptides, or agonists or antagonists of the present invention, can be used in assays to test for one or more biological activities. If these polynucleotides or polypeptides, or agonists or antagonists of the present invention, do exhibit activity in a particular assay, it is likely that these molecules may be involved in the diseases associated with the biological activity. Thus, the polynucleotides and polypeptides, and agonists or antagonists could be used to treat the associated disease.

[0567] Members of the secreted family of proteins are believed to be involved in biological activities associated with, for example, cellular signaling. Accordingly, compositions of the invention (including polynucleotides, polypeptides and antibodies of the invention, and fragments and variants thereof) may be used in diagnosis, prognosis, prevention and/or treatment of diseases and/or disorders associated with aberrant activity of secreted polypeptides.

[0568] In preferred embodiments, compositions of the invention (including polynucleotides, polypeptides and antibodies of the invention, and fragments and variants thereof) may be used in the diagnosis, prognosis, prevention, treatment, and/or amelioration of diseases and/or disorders relating to the gastrointestinal system (e.g., Crohn's disease, pancreatitis, gallstones, antibiotic-associated colitis, duodenitis, gastrointestinal neoplasms, and as described in the “Gastrointestinal Disorders” section below). In certain embodiments, a polypeptide of the invention, or polynucleotides, antibodies, agonists, or antagonists corresponding to that polypeptide, may be used to diagnose and/or prognosticate diseases and/or disorders associated with the tissue(s) in which the polypeptide of the invention is expressed including one, two, three, four, five, or more tissues disclosed in Table 1B.2, column 5 (Tissue Distribution Library Code).

[0569] Thus, polynucleotides, translation products and antibodies of the invention are useful in the diagnosis, detection, prevention, prognistication, and/or treatment of diseases and/or disorders associated with activities that include, but are not limited to, prohormone activation, neurotransmitter activity, cellular signaling, cellular proliferation, cellular differentiation, and cell migration.

[0570] More generally, polynucleotides, translation products and antibodies corresponding to this gene may be useful for the diagnosis, prognosis, prevention, treatment and/or amelioration of diseases and/or disorders associated with the following system or systems.

[0571] Immune Activity

[0572] Polynucleotides, polypeptides, antibodies, and/or agonists or antagonists of the present invention may be useful in preventing, diagnosing, prognosticating, treating, and/or ameliorating diseases, disorders, and/or conditions of the immune system, by, for example, activating or inhibiting the proliferation, differentiation, or mobilization (chemotaxis) of immune cells. Immune cells develop through a process called hematopoiesis, producing myeloid (platelets, red blood cells, neutrophils, and macrophages) and lymphoid (B and T lymphocytes) cells from pluripotent stem cells. The etiology of these immune diseases, disorders, and/or conditions may be genetic, somatic, such as cancer and some autoimmune diseases, acquired (e.g., by chemotherapy or toxins), or infectious. Moreover, polynucleotides, polypeptides, antibodies, and/or agonists or antagonists of the present invention can be used as a marker or detector of a particular immune system disease or disorder.

[0573] Wound Healing and Epithelial Cell Proliferation

[0574] In accordance with yet a further aspect of the present invention, there is provided a process for utilizing polynucleotides or polypeptides, as well as agonists or antagonists of the present invention, for therapeutic purposes, for example, to stimulate epithelial cell proliferation and basal keratinocytes for the purpose of wound healing, and to stimulate hair follicle production and healing of dermal wounds. Polynucleotides or polypeptides, as well as agonists or antagonists of the present invention, may be clinically useful in stimulating wound healing including surgical wounds, excisional wounds, deep wounds involving damage of the dermis and epidermis, eye tissue wounds, dental tissue wounds, oral cavity wounds, diabetic ulcers, dermal ulcers, cubitus ulcers, arterial ulcers, venous stasis ulcers, burns resulting from heat exposure or chemicals, and other abnormal wound healing conditions such as uremia, malnutrition, vitamin deficiencies and complications associated with systemic treatment with steroids, radiation therapy and antineoplastic drugs and antimetabolites. Polynucleotides or polypeptides, as well as agonists or antagonists of the present invention, could be used to promote dermal reestablishment subsequent to dermal loss

[0575] Polynucleotides or polypeptides, as well as agonists or antagonists of the present invention, could be used to increase the adherence of skin grafts to a wound bed and to stimulate re-epithelialization from the wound bed. The following are types of grafts that polynucleotides or polypeptides, agonists or antagonists of the present invention, could be used to increase adherence to a wound bed: autografts, artificial skin, allografts, autodermic graft, autoepdermic grafts, avacular grafts, Blair-Brown grafts, bone graft, brephoplastic grafts, cutis graft, delayed graft, dermic graft, epidermic graft, fascia graft, full thickness graft, heterologous graft, xenograft, homologous graft, hyperplastic graft, lamellar graft, mesh graft, mucosal graft, Ollier-Thiersch graft, omenpal graft, patch graft, pedicle graft, penetrating graft, split skin graft, thick split graft. Polynucleotides or polypeptides, as well as agonists or antagonists of the present invention, can be used to promote skin strength and to improve the appearance of aged skin.

[0576] It is believed that polynucleotides or polypeptides, as well as agonists or antagonists of the present invention, will also produce changes in hepatocyte proliferation, and epithelial cell proliferation in the lung, breast, pancreas, stomach, small intestine, and large intestine. Polynucleotides or polypeptides, as well as agonists or antagonists of the present invention, could promote proliferation of epithelial cells such as sebocytes, hair follicles, hepatocytes, type II pneumocytes, mucin-producing goblet cells, and other epithelial cells and their progenitors contained within the skin, lung, liver, and gastrointestinal tract. Polynucleotides or polypeptides, agonists or antagonists of the present invention, may promote proliferation of endothelial cells, keratinocytes, and basal keratinocytes.

[0577] Polynucleotides or polypeptides, as well as agonists or antagonists of the present invention, could also be used to reduce the side effects of gut toxicity that result from radiation, chemotherapy treatments or viral infections. Polynucleotides or polypeptides, as well as agonists or antagonists of the present invention, may have a cytoprotective effect on the small intestine mucosa. Polynucleotides or polypeptides, as well as agonists or antagonists of the present invention, may also stimulate healing of mucositis (mouth ulcers) that result from chemotherapy and viral infections.

[0578] Polynucleotides or polypeptides, as well as agonists or antagonists of the present invention, could further be used in full regeneration of skin in full and partial thickness skin defects, including burns, (i.e., repopulation of hair follicles, sweat glands, and sebaceous glands), treatment of other skin defects such as psoriasis. Polynucleotides or polypeptides, as well as agonists or antagonists of the present invention, could be used to treat epidermolysis bullosa, a defect in adherence of the epidermis to the underlying dermis which results in frequent, open and painful blisters by accelerating reepithelialization of these lesions. Polynucleotides or polypeptides, as well as agonists or antagonists of the present invention, could also be used to treat gastric and doudenal ulcers and help heal by scar formation of the mucosal lining and regeneration of glandular mucosa and duodenal mucosal lining more rapidly. Inflammatory bowel diseases, such as Crohn's disease and ulcerative colitis, are diseases which result in destruction of the mucosal surface of the small or large intestine, respectively. Thus, polynucleotides or polypeptides, as well as agonists or antagonists of the present invention, could be used to promote the resurfacing of the mucosal surface to aid more rapid healing and to prevent progression of inflammatory bowel disease. Treatment with polynucleotides or polypeptides, agonists or antagonists of the present invention, is expected to have a significant effect on the production of mucus throughout the gastrointestinal tract and could be used to protect the intestinal mucosa from injurious substances that are ingested or following surgery. Polynucleotides or polypeptides, as well as agonists or antagonists of the present invention, could be used to treat diseases associate with the under expression.

[0579] Moreover, polynucleotides or polypeptides, as well as agonists or antagonists of the present invention, could be used to prevent and heal damage to the lungs due to various pathological states. Polynucleotides or polypeptides, as well as agonists or antagonists of the present invention, which could stimulate proliferation and differentiation and promote the repair of alveoli and brochiolar epithelium to prevent or treat acute or chronic lung damage. For example, emphysema, which results in the progressive loss of aveoli, and inhalation injuries, i.e., resulting from smoke inhalation and burns, that cause necrosis of the bronchiolar epithelium and alveoli could be effectively treated using polynucleotides or polypeptides, agonists or antagonists of the present invention. Also, polynucleotides or polypeptides, as well as agonists or antagonists of the present invention, could be used to stimulate the proliferation of and differentiation of type II pneumocytes, which may help treat or prevent disease such as hyaline membrane diseases, such as infant respiratory distress syndrome and bronchopulmonary displasia, in premature infants.

[0580] Polynucleotides or polypeptides, as well as agonists or antagonists of the present invention, could stimulate the proliferation and differentiation of hepatocytes and, thus, could be used to alleviate or treat liver diseases and pathologies such as fulminant liver failure caused by cirrhosis, liver damage caused by viral hepatitis and toxic substances (i.e., acetarninophen, carbon tetraholoride and other hepatotoxins known in the art).

[0581] In addition, polynucleotides or polypeptides, as well as agonists or antagonists of the present invention, could be used treat or prevent the onset of diabetes mellitus. In patients with newly diagnosed Types I and II diabetes, where some islet cell function remains, polynucleotides or polypeptides, as well as agonists or antagonists of the present invention, could be used to maintain the islet function so as to alleviate, delay or prevent permanent manifestation of the disease. Also, polynucleotides or polypeptides, as well as agonists or antagonists of the present invention, could be used as an auxiliary in islet cell transplantation to improve or promote islet cell function.

[0582] Gastrointestinal Disorders

[0583] Polynucleotides or polypeptides, or agonists or antagonists of the present invention, may be used to detect, prevent, diagnose, prognosticate, treat, and/or ameliorate gastrointestinal diseases and disorders, including inflammatory diseases and/or conditions, infections, cancers (e.g., intestinal neoplasms (carcinoid tumor of the small intestine, non-Hodgkin's lymphoma of the small intestine, small bowl lymphoma)), and ulcers, such as peptic ulcers.

[0584] Gastrointestinal disorders include dysphagia, odynophagia, inflammation of the esophagus, peptic esophagitis, gastric reflux, submucosal fibrosis and stricturing, Mallory-Weiss lesions, leiomyomas, lipomas, epidermal cancers, adeoncarcinomas, gastric retention disorders, gastroenteritis, gastric atrophy, gastric/stomach cancers, polyps of the stomach, autoimmune disorders such as pernicious anemia, pyloric stenosis, gastritis (bacterial, viral, eosinophilic, stress-induced, chronic erosive, atrophic, plasma cell, and Ménétrier's), and peritoneal diseases (e.g., chyloperioneum, hemoperitoneum, mesenteric cyst, mesenteric lymphadenitis, mesenteric vascular occlusion, panniculitis, neoplasms, peritonitis, pneumoperitoneum, bubphrenic abscess,).

[0585] Gastrointestinal disorders also include disorders associated with the small intestine, such as malabsorption syndromes, distension, irritable bowel syndrome, sugar intolerance, celiac disease, duodenal ulcers, duodenitis, tropical sprue, Whipple's disease, intestinal lymphangiectasia, Crohn's disease, appendicitis, obstructions of the ileum, Meckel's diverticulum, multiple diverticula, failure of complete rotation of the small and large intestine, lymphoma, and bacterial and parasitic diseases (such as Traveler's diarrhea, typhoid and paratyphoid, cholera, infection by Roundworms (Ascariasis lumbricoides), Hookworms (Ancylostoma duodenale), Threadworms (Enterobius vennicularis), Tapeworms (Taenia saginata, Echinococcus granulosus, Diphyllobothrium spp., and T. solium).

[0586] Liver diseases and/or disorders include intrahepatic cholestasis (alagille syndrome, biliary liver cirrhosis), fatty liver (alcoholic fatty liver, reye syndrome), hepatic vein thrombosis, hepatolentricular degeneration, hepatomegaly, hepatopulmonary syndrome, hepatorenal syndrome, portal hypertension (esophageal and gastric varices), liver abscess (amebic liver abscess), liver cirrhosis (alcoholic, biliary and experimental), alcoholic liver diseases (fatty liver, hepatitis, cirrhosis), parasitic (hepatic echinococcosis, fascioliasis, amebic liver abscess), jaundice (hemolytic, hepatocellular, and cholestatic), cholestasis, portal hypertension, liver enlargement, ascites, hepatitis (alcoholic hepatitis, animal hepatitis, chronic hepatitis (autoimmune, hepatitis B, hepatitis C, hepatitis D, drug induced), toxic hepatitis, viral human hepatitis (hepatitis A, hepatitis B, hepatitis C, hepatitis D, hepatitis E), Wilson's disease, granulomatous hepatitis, secondary biliary cirrhosis, hepatic encephalopathy, portal hypertension, varices, hepatic encephalopathy, primary biliary cirrhosis, primary sclerosing cholangitis, hepatocellular adenoma, hemangiomas, bile stones, liver failure (hepatic encephalopathy, acute liver failure), and liver neoplasms (angiomyolipoma, calcified liver metastases, cystic liver metastases, epithelial tumors, fibrolamellar hepatocarcinoma, focal nodular hyperplasia, hepatic adenoma, hepatobiliary cystadenoma, hepatoblastoma, hepatocellular carcinoma, hepatoma, liver cancer, liver hemangioendothelioma, mesenchymal hamartoma, mesenchymal tumors of liver, nodular regenerative hyperplasia, benign liver tumors (Hepatic cysts [Simple cysts, Polycystic liver disease, Hepatobiliary cystadenoma, Choledochal cyst], Mesenchymal tumors [Mesenchymal hamartoma, Infantile hemangioendothelioma, Hemangioma, Peliosis hepatis, Lipomas, Inflammatory pseudotumor, Miscellaneous], Epithelial tumors [Bile duct epithelium (Bile duct hamartoma, Bile duct adenoma), Hepatocyte (Adenoma, Focal nodular hyperplasia, Nodular regenerative hyperplasia)], malignant liver tumors [hepatocellular, hepatoblastoma, hepatocellular carcinoma, cholangiocellular, cholangiocarcinoma, cystadenocarcinoma, tumors of blood vessels, angiosarcoma, Karposi's sarcoma, hemangioendothelioma, other tumors, embryonal sarcoma, fibrosarcoma, leiomyosarcoma, rhabdomyosarcoma, carcinosarcoma, teratoma, carcinoid, squamous carcinoma, primary lymphoma]), peliosis hepatis, erythrohepatic porphyria, hepatic porphyria (acute intermittent porphyria, porphyria cutanea tarda), Zellweger syndrome).

[0587] Pancreatic diseases and/or disorders include acute pancreatitis, chronic pancreatitis (acute necrotizing pancreatitis, alcoholic pancreatitis), neoplasms (adenocarcinoma of the pancreas, cystadenocarcinoma, insulinoma, gastrinoma, and glucagonoma, cystic neoplasms, islet-cell tumors, pancreoblastoma), and other pancreatic diseases (e.g., cystic fibrosis, cyst (pancreatic pseudocyst, pancreatic fistula, insufficiency)).

[0588] Gallbladder diseases include gallstones (cholelithiasis and choledocholithiasis), postcholecystectomy syndrome, diverticulosis of the gallbladder, acute cholecystitis, chronic cholecystitis, bile duct tumors, and mucocele.

[0589] Diseases and/or disorders of the large intestine include antibiotic-associated colitis, diverticulitis, ulcerative colitis, acquired megacolon, abscesses, fumgal and bacterial infections, anorectal disorders (e.g., fissures, hemorrhoids), colonic diseases (colitis, colonic neoplasms [colon cancer, adenomatous colon polyps (e.g., villous adenoma), colon carcinoma, colorectal cancer], colonic diverticulitis, colonic diverticulosis, megacolon [Hirschsprung disease, toxic megacolon]; sigmoid diseases [proctocolitis, sigmoin neoplasms]), constipation, Crohn's disease, diarrhea (infantile diarrhea, dysentery), duodenal diseases (duodenal neoplasms, duodenal obstruction, duodenal ulcer, duodenitis), enteritis (enterocolitis), HIV enteropathy, ileal diseases (ileal neoplasms, ileitis), immunoproliferative small intestinal disease, inflammatory bowel disease (ulcerative colitis, Crohn's disease), intestinal atresia, parasitic diseases (anisakiasis, balantidiasis, blastocystis infections, cryptosporidiosis, dientamoebiasis, amebic dysentery, giardiasis), intestinal fistula (rectal fistula), intestinal neoplasms (cecal neoplasms, colonic neoplasms, duodenal neoplasms, ileal neoplasms, intestinal polyps, jejunal neoplasms, rectal neoplasms), intestinal obstruction (afferent loop syndrome, duodenal obstruction, impacted feces, intestinal pseudo-obstruction [cecal volvulus], intussusception), intestinal perforation, intestinal polyps (colonic polyps, gardner syndrome, peutz-jeghers syndrome), jejunal diseases Oejunal neoplasms), malabsorption syndromes (blind loop syndrome, celiac disease, lactose intolerance, short bowl syndrome, tropical sprue, whipple's disease), mesenteric vascular occlusion, pneumatosis cystoides intestinalis, protein-losing enteropathies (intestinal lymphagiectasis), rectal diseases (anus diseases, fecal incontinence, hemorrhoids, proctitis, rectal fistula, rectal prolapse, rectocele), peptic ulcer (duodenal ulcer, peptic esophagitis, hemorrhage, perforation, stomach ulcer, Zollinger-Ellison syndrome), postgastrectomy syndromes (dumping syndrome), stomach diseases (e.g., achlorhydria, duodenogastric reflux (bile reflux), gastric antral vascular ectasia, gastric fistula, gastric outlet obstruction, gastritis (atrophic or hypertrophic), gastroparesis, stomach dilatation, stomach diverticulum, stomach neoplasms (gastric cancer, gastric polyps, gastric adenocarcinoma, hyperplastic gastric polyp), stomach rupture, stomach ulcer, stomach volvulus), tuberculosis, visceroptosis, vomiting (e.g., hematemesis, hyperemesis gravidarum, postoperative nausea and vomiting) and hemorrhagic colitis.

[0590] Further diseases and/or disorders of the gastrointestinal system include biliary tract diseases, such as, gastroschisis, fistula (e.g., biliary fistula, esophageal fistula, gastric fistula, intestinal fistula, pancreatic fistula), neoplasms (e.g., biliary tract neoplasms, esophageal neoplasms, such as adenocarcinoma of the esophagus, esophageal squamous cell carcinoma, gastrointestinal neoplasms, pancreatic neoplasms, such as adenocarcinoma of the pancreas, mucinous cystic neoplasm of the pancreas, pancreatic cystic neoplasms, pancreatoblastoma, and peritoneal neoplasms), esophageal disease (e.g., bullous diseases, candidiasis, glycogenic acanthosis, ulceration, barrett esophagus varices, atresia, cyst, diverticulum (e.g., Zenker's diverticulum), fistula (e.g., tracheoesophageal fistula), motility disorders (e.g., CEST syndrome, deglutition disorders, achalasia, spasm, gastroesophageal reflux), neoplasms, perforation (e.g., Boerhaave syndrome, Mallory-Weiss syndrome), stenosis, esophagitis, diaphragmatic hernia (e.g., hiatal hernia); gastrointestinal diseases, such as, gastroenteritis (e.g., cholera morbus, norwalk virus infection), hemorrhage (e.g., hematemesis, melena, peptic ulcer hemorrhage), stomach neoplasms (gastric cancer, gastric polyps, gastric adenocarcinoma, stomach cancer)), hernia (e.g., congenital diaphragmatic hernia, femoral hernia, inguinal hernia, obturator hernia, umbilical hernia, ventral hernia), and intestinal diseases (e.g., cecal diseases (appendicitis, cecal neoplasms)).

[0591] Chemotaxis

[0592] Polynucleotides or polypeptides, as well as agonists or antagonists of the present invention may have chemotaxis activity. A chemotaxic molecule attracts or mobilizes cells (e.g., monocytes, fibroblasts, neutrophils, T-cells, mast cells, eosinophils, epithelial and/or endothelial cells) to a particular site in the body, such as inflammation, infection, or site of hyperproliferation. The mobilized cells can then fight off and/or heal the particular trauma or abnormality.

[0593] Polynucleotides or polypeptides, as well as agonists or antagonists of the present invention may increase chemotaxic activity of particular cells. These chemotactic molecules can then be used to treat inflammation, infection, hyperproliferative disorders, or any immune system disorder by increasing the number of cells targeted to a particular location in the body. For example, chemotaxic molecules can be used to treat wounds and other trauma to tissues by attracting immune cells to the injured location. Chemotactic molecules of the present invention can also attract fibroblasts, which can be used to treat wounds.

[0594] It is also contemplated that polynucleotides or polypeptides, as well as agonists or antagonists of the present invention may inhibit chemotactic activity. These molecules could also be used to treat disorders. Thus, polynucleotides or polypeptides, as well as agonists or antagonists of the present invention could be used as an inhibitor of chemotaxis.

[0595] Binding Actinty

[0596] A polypeptide of the present invention may be used to screen for molecules that bind to the polypeptide or for molecules to which the polypeptide binds. The binding of the polypeptide and the molecule may activate (agonist), increase, inhibit (antagonist), or decrease activity of the polypeptide or the molecule bound. Examples of such molecules include antibodies, oligonucleotides, proteins (e.g., receptors), or small molecules.

[0597] Preferably, the molecule is closely related to the natural ligand of the polypeptide, e.g., a fragment of the ligand, or a natural substrate, a ligand, a structural or functional mimetic. (See, Coligan et al., Current Protocols in Immunology 1(2):Chapter 5 (1991)). Similarly, the molecule can be closely related to the natural receptor to which the polypeptide binds, or at least, a fragment of the receptor capable of being bound by the polypeptide (e.g., active site). In either case, the molecule can be rationally designed using known techniques.

[0598] Preferably, the screening for these molecules involves producing appropriate cells which express the polypeptide. Preferred cells include cells from mammals, yeast, Drosophila, or E. coli. Cells expressing the polypeptide (or cell membrane containing the expressed polypeptide) are then preferably contacted with a test compound potentially containing the molecule to observe binding, stimulation, or inhibition of activity of either the polypeptide or the molecule.

[0599] The assay may simply test binding of a candidate compound to the polypeptide, wherein binding is detected by a label, or in an assay involving competition with a labeled competitor. Further, the assay may test whether the candidate compound results in a signal generated by binding to the polypeptide.

[0600] Alternatively, the assay can be carried out using cell-free preparations, polypeptide/molecule affixed to a solid support, chemical libraries, or natural product mixtures. The assay may also simply comprise the steps of mixing a candidate compound with a solution containing a polypeptide, measuring polypeptide/molecule activity or binding, and comparing the polypeptide/molecule activity or binding to a standard.

[0601] Preferably, an ELISA assay can measure polypeptide level or activity in a sample (e.g., biological sample) using a monoclonal or polyclonal antibody. The antibody can measure polypeptide level or activity by either binding, directly or indirectly, to the polypeptide or by competing with the polypeptide for a substrate.

[0602] Additionally, the receptor to which the polypeptide of the present invention binds can be identified by numerous methods known to those of skill in the art, for example, ligand panning and FACS sorting (Coligan, et al., Current Protocols in Immun., 1(2), Chapter 5, (1991)). For example, expression cloning is employed wherein polyadenylated RNA is prepared from a cell responsive to the polypeptides, for example, NIH3T3 cells which are known to contain multiple receptors for the FGF family proteins, and SC-3 cells, and a cDNA library created from this RNA is divided into pools and used to transfect COS cells or other cells that are not responsive to the polypeptides. Transfected cells which are grown on glass slides are exposed to the polypeptide of the present invention, after they have been labeled. The polypeptides can be labeled by a variety of means including iodination or inclusion of a recognition site for a site-specific protein kinase.

[0603] Following fixation and incubation, the slides are subjected to auto-radiographic analysis. Positive pools are identified and sub-pools are prepared and re-transfected using an iterative sub-pooling and re-screening process, eventually yielding a single clones that encodes the putative receptor.

[0604] As an alternative approach for receptor identification, the labeled polypeptides can be photoaffinity linked with cell membrane or extract preparations that express the receptor molecule. Cross-linked material is resolved by PAGE analysis and exposed to X-ray film. The labeled complex containing the receptors of the polypeptides can be excised, resolved into peptide fragments, and subjected to protein microsequencing. The amino acid sequence obtained from microsequencing would be used to design a set of degenerate oligonucleotide probes to screen a cDNA library to identify the genes encoding the putative receptors.

[0605] Moreover, the techniques of gene-shuffling, motif-shuffling, exon-shuffling, and/or codon-shuffling (collectively referred to as “DNA shuffling”) may be employed to modulate the activities of the polypeptide of the present invention thereby effectively generating agonists and antagonists of the polypeptide of the present invention. See generally, U.S. Pat. Nos. 5,605,793, 5,811,238, 5,830,721, 5,834,252, and 5,837,458, and Patten, P. A., et al., Curr. Opinion Biotechnol. 8:724-33 (1997); Harayama, S. Trends Biotechnol. 16(2):76-82 (1998); Hansson, L. O., et al., J. Mol. Biol. 287:265-76 (1999); and Lorenzo, M. M. and Blasco, R. Biotechniques 24(2):308-13 (1998); each of these patents and publications are hereby incorporated by reference). In one embodiment, alteration of polynucleotides and corresponding polypeptides may be achieved by DNA shuffling. DNA shuffling involves the assembly of two or more DNA segments into a desired molecule by homologous, or site-specific, recombination. In another embodiment, polynucleotides and corresponding polypeptides may be altered by being subjected to random mutagenesis by error-prone PCR, random nucleotide insertion or other methods prior to recombination. In another embodiment, one or more components, motifs, sections, parts, domains, fragments, etc., of the polypeptide of the present invention may be recombined with one or more components, motifs, sections, parts, domains, fragments, etc. of one or more heterologous molecules. In preferred embodiments, the heterologous molecules are family members. In further preferred embodiments, the heterologous molecule is a growth factor such as, for example, platelet-derived growth factor (PDGF), insulin-like growth factor (IGF-I), transforming growth factor (TGF)-alpha, epidermal growth factor (EGF), fibroblast growth factor (FGF), TGF-beta, bone morphogenetic protein (BMP)-2, BMP4, BMP-5, BMP-6, BMP-7, activins A and B, decapentaplegic(dpp), 60A, OP-2, dorsalin, growth differentiation factors (GDFs), nodal, MIS, inhibin-alpha, TGF-beta1, TGF-beta2, TGF-beta3, TGP-beta5, and glial-derived neurotrophic factor (GDNF).

[0606] Other preferred fragments are biologically active fragments of the polypeptide of the present invention. Biologically active fragments are those exhibiting activity similar, but not necessarily identical, to an activity of the polypeptide of the present invention. The biological activity of the fragments may include an improved desired activity, or a decreased undesirable activity.

[0607] Additionally, this invention provides a method of screening compounds to identify those which modulate the action of the polypeptide of the present invention. An example of such an assay comprises combining a mammalian fibroblast cell, a the polypeptide of the present invention, the compound to be screened and ³[H] thymidine under cell culture conditions where the fibroblast cell would normally proliferate. A control assay may be performed in the absence of the compound to be screened and compared to the amount of fibroblast proliferation in the presence of the compound to determine if the compound stimulates proliferation by determining the uptake of 3[H] thymidine in each case. The amount of fibroblast cell proliferation is measured by liquid scintillation chromatography which measures the incorporation of 3[H] thymidine. Both agonist and antagonist compounds may be identified by this procedure.

[0608] In another method, a mammalian cell or membrane preparation expressing a receptor for a polypeptide of the present invention is incubated with a labeled polypeptide of the present invention in the presence of the compound. The ability of the compound to enhance or block this interaction could then be measured. Alternatively, the response of a known second messenger system following interaction of a compound to be screened and the receptor is measured and the ability of the compound to bind to the receptor and elicit a second messenger response is measured to determine if the compound is a potential agonist or antagonist. Such second messenger systems include but are not limited to, cAMP guanylate cyclase, ion channels or phosphoinositide hydrolysis.

[0609] All of these above assays can be used as diagnostic or prognostic markers. The molecules discovered using these assays can be used to treat disease or to bring about a particular result in a patient (e.g., blood vessel growth) by activating or inhibiting the polypeptide/molecule. Moreover, the assays can discover agents which may inhibit or enhance the production of the polypeptides of the invention from suitably manipulated cells or tissues.

[0610] Therefore, the invention includes a method of identifying compounds which bind to a polypeptide of the invention comprising the steps of: (a) incubating a candidate binding compound with a polypeptide of the present invention; and (b) determining if binding has occurred. Moreover, the invention includes a method of identifying agonists/antagonists comprising the steps of: (a) incubating a candidate compound with a polypeptide of the present invention, (b) assaying a biological activity, and (b) determining if a biological activity of the polypeptide has been altered.

[0611] Targeted Delivery

[0612] In another embodiment, the invention provides a method of delivering compositions to targeted cells expressing a receptor for a polypeptide of the invention, or cells expressing a cell bound form of a polypeptide of the invention.

[0613] As discussed herein, polypeptides or antibodies of the invention may be associated with heterologous polypeptides, heterologous nucleic acids, toxins, or prodrugs via hydrophobic, hydrophilic, ionic and/or covalent interactions. In one embodiment, the invention provides a method for the specific delivery of compositions of the invention to cells by administering polypeptides of the invention (including antibodies) that are associated with heterologous polypeptides or nucleic acids. In one example, the invention provides a method for delivering a therapeutic protein into the targeted cell. In another example, the invention provides a method for delivering a single stranded nucleic acid (e.g., antisense or ribozymes) or double stranded nucleic acid (e.g., DNA that can integrate into the cell's genome or replicate episomally and that can be transcribed) into the targeted cell.

[0614] In another embodiment, the invention provides a method for the specific destruction of cells (e.g., the destruction of tumor cells) by administering polypeptides of the invention (e.g., polypeptides of the invention or antibodies of the invention) in association with toxins or cytotoxic prodrugs.

[0615] By “toxin” is meant compounds that bind and activate endogenous cytotoxic effector systems, radioisotopes, holotoxins, modified toxins, catalytic subunits of toxins, or any molecules or enzymes not normally present in or on the surface of a cell that under defined conditions cause the cell's death. Toxins that may be used according to the methods of the invention include, but are not limited to, radioisotopes known in the art, compounds such as, for example, antibodies (or complement fixing containing portions thereof) that bind an inherent or induced endogenous cytotoxic effector system, thymidine kinase, endonuclease, RNAse, alpha toxin, ricin, abrin, Pseudomonas exotoxin A, diphtheria toxin, saporin, momordin, gelonin, pokeweed antiviral protein, alpha-sarcin and cholera toxin. By “cytotoxic prodrug” is meant a non-toxic compound that is converted by an enzyme, normally present in the cell, into a cytotoxic compound. Cytotoxic prodrugs that may be used according to the methods of the invention include, but are not limited to, glutamyl derivatives of benzoic acid mustard alkylating agent, phosphate derivatives of etoposide or mitomycin C, cytosine arabinoside, daunorubisin, and phenoxyacetamide derivatives of doxorubicin.

[0616] Drug Screening

[0617] Further contemplated is the use of the polypeptides of the present invention, or the polynucleotides encoding these polypeptides, to screen for molecules which modify the activities of the polypeptides of the present invention. Such a method would include contacting the polypeptide of the present invention with a selected compound(s) suspected of having antagonist or agonist activity, and assaying the activity of these polypeptides following binding.

[0618] This invention is particularly useful for screening therapeutic compounds by using the polypeptides of the present invention, or binding fragments thereof, in any of a variety of drug screening techniques. The polypeptide or fragment employed in such a test may be affixed to a solid support, expressed on a cell surface, free in solution, or located intracellularly. One method of drug screening utilizes eukaryotic or prokaryotic host cells which are stably transformed with recombinant nucleic acids expressing the polypeptide or fragment. Drugs are screened against such transformed cells in competitive binding assays. One may measure, for example, the formulation of complexes between the agent being tested and a polypeptide of the present invention.

[0619] Thus, the present invention provides methods of screening for drugs or any other agents which affect activities mediated by the polypeptides of the present invention. These methods comprise contacting such an agent with a polypeptide of the present invention or a fragment thereof and assaying for the presence of a complex between the agent and the polypeptide or a fragment thereof, by methods well known in the art. In such a competitive binding assay, the agents to screen are typically labeled. Following incubation, free agent is separated from that present in bound form, and the amount of free or uncomplexed label is a measure of the ability of a particular agent to bind to the polypeptides of the present invention.

[0620] Another technique for drug screening provides high throughput screening for compounds having suitable binding affinity to the polypeptides of the present invention, and is described in great detail in European Patent Application 84/03564, published on Sep. 13, 1984, which is incorporated herein by reference herein. Briefly stated, large numbers of different small peptide test compounds are synthesized on a solid substrate, such as plastic pins or some other surface. The peptide test compounds are reacted with polypeptides of the present invention and washed. Bound polypeptides are then detected by methods well known in the art. Purified polypeptides are coated directly onto plates for use in the aforementioned drug screening techniques. In addition, non-neutralizing antibodies may be used to capture the peptide and immobilize it on the solid support.

[0621] This invention also contemplates the use of competitive drug screening assays in which neutralizing antibodies capable of binding polypeptides of the present invention specifically compete with a test compound for binding to the polypeptides or fragments thereof. In this manner, the antibodies are used to detect the presence of any peptide which shares one or more antigenic epitopes with a polypeptide of the invention.

[0622] Antisense and Ribozyme (Antagonists)

[0623] In specific embodiments, antagonists according to the present invention are nucleic acids corresponding to the sequences contained in SEQ ID NO:X, or the complementary strand thereof, and/or to cDNA sequences contained in cDNA ATCC Deposit No:Z identified for example, in Table 1A and/or 1B. In one embodiment, antisense sequence is generated internally, by the organism, in another embodiment, the antisense sequence is separately administered (see, for example, O'Connor, I., Neurochem. 56:560 (1991). Oligodeoxynucleotides as Antisense Inhibitors of Gene Expression, CRC Press, Boca Raton, Fla. (1988). Antisense technology can be used to control gene expression through antisense DNA or RNA, or through triple-helix formation. Antisense techniques are discussed for example, in Okano, J., Neurochenm 56:560 (1991); Oligodeoxynucleotides as Antisense Inhibitors of Gene Expression, CRC Press, Boca Raton, Fla. (1988). Triple helix formation is discussed in, for instance, Lee et al., Nucleic Acids Research 6:3073 (1979); Cooney et al., Science 241:456 (1988); and Dervan et al., Science 251:1300 (1991). The methods are based on binding of a polynucleotide to a complementary DNA or RNA.

[0624] For example, the use of c-myc and c-myb antisense RNA constructs to inhibit the growth of the non-lymphocytic leukemia cell line HL-60 and other cell lines was previously described. (Wickstrom et al. (1988); Anfossi et al. (1989)). These experiments were performed in vitro by incubating cells with the oligoribonucleotide. A similar procedure for in vivo use is described in WO 91/15580. Briefly, a pair of oligonucleotides for a given antisense RNA is produced as follows: A sequence complimentary to the first 15 bases of the open reading frame is flanked by an EcoR1 site on the 5 end and a HindIII site on the 3 end. Next, the pair of oligonucleotides is heated at 90° C. for one minute and then annealed in 2×ligation buffer (20 mM TRIS HCl pH 7.5, 10 mM MgCl2, 10MM dithiothreitol (DTT) and 0.2 mM ATP) and then ligated to the EcoR1/Hind III site of the retroviral vector PMV7 (WO 91/15580).

[0625] For example, the 5′ coding portion of a polynucleotide that encodes the polypeptide of the present invention may be used to design an antisense RNA oligonucleotide of from about 10 to 40 base pairs in length. A DNA oligonucleotide is designed to be complementary to a region of the gene involved in transcription thereby preventing transcription and the production of the receptor. The antisense RNA oligonucleotide hybridizes to the mRNA in vivo and blocks translation of the mRNA molecule into receptor polypeptide.

[0626] In one embodiment, the antisense nucleic acid of the invention is produced intracellularly by transcription from an exogenous sequence. For example, a vector or a portion thereof, is transcribed, producing an antisense nucleic acid (RNA) of the invention. Such a vector would contain a sequence encoding the antisense nucleic acid. Such a vector can remain episomal or become chromosomally integrated, as long as it can be transcribed to produce the desired antisense RNA. Such vectors can be constructed by recombinant DNA technology methods standard in the art. Vectors can be plasmid, viral, or others known in the art, used for replication and expression in vertebrate cells. Expression of the sequence encoding the polypeptide of the present invention or fragments thereof, can be by any promoter known in the art to act in vertebrate, preferably human cells. Such promoters can be inducible or constitutive. Such promoters include, but are not limited to, the SV40 early promoter region (Bernoist and Chambon, Nature 29:304-310 (1981), the promoter contained in the 3′ long terminal repeat of Rous sarcoma virus (Yamamoto et al., Cell 22:787-797 (1980), the herpes thymidine promoter (Wagner et al., Proc. Natl. Acad. Sci. U.S.A. 78:1441-1445 (1981), the regulatory sequences of the metallothionein gene (Brinster, et al., Nature 296:39-42 (1982)), etc.

[0627] The antisense nucleic acids of the invention comprise a sequence complementary to at least a portion of an RNA transcript of a gene of the present invention. However, absolute complementarity, although preferred, is not required. A sequence “complementary to at least a portion of an RNA,” referred to herein, means a sequence having sufficient complementarity to be able to hybridize with the RNA, forming a stable duplex; in the case of double stranded antisense nucleic acids, a single strand of the duplex DNA may thus be tested, or triplex formation may be assayed. The ability to hybridize will depend on both the degree of complementarity and the length of the antisense nucleic acid. Generally, the larger the hybridizing nucleic acid, the more base mismatches with a RNA it may contain and still form a stable duplex (or triplex as the case may be). One skilled in the art can ascertain a tolerable degree of mismatch by use of standard procedures to determine the melting point of the hybridized complex.

[0628] Oligonucleotides that are complementary to the 5′ end of the message, e.g., the 5′ untranslated sequence up to and including the AUG initiation codon, should work most efficiently at inhibiting translation. However, sequences complementary to the 3′ untranslated sequences of mRNAs have been shown to be effective at inhibiting translation of mRNAs as well. See generally, Wagner, R., 1994, Nature 372:333-335. Thus, oligonucleotides complementary to either the 5′- or 3′-non-translated, non-coding regions of polynucleotide sequences described herein could be used in an antisense approach to inhibit translation of endogenous mRNA. Oligonucleotides complementary to the 5′ untranslated region of the mRNA should include the complement of the AUG start codon. Antisense oligonucleotides complementary to mRNA coding regions are less efficient inhibitors of translation but could be used in accordance with the invention. Whether designed to hybridize to the 5′-, 3′- or coding region of mRNA of the present invention, antisense nucleic acids should be at least six nucleotides in length, and are preferably oligonucleotides ranging from 6 to about 50 nucleotides in length. In specific aspects the oligonucleotide is at least 10 nucleotides, at least 17 nucleotides, at least 25 nucleotides or at least 50 nucleotides.

[0629] The polynucleotides of the invention can be DNA or RNA or chimeric mixtures or derivatives or modified versions thereof, single-stranded or double-stranded. The oligonucleotide can be modified at the base moiety, sugar moiety, or phosphate backbone, for example, to improve stability of the molecule, hybridization, etc. The oligonucleotide may include other appended groups such as peptides (e.g., for targeting host cell receptors in vivo), or agents facilitating transport across the cell membrane (see, e.g., Letsinger et al., 1989, Proc. Natl. Acad. Sci. U.S.A. 86:6553-6556; Lemaitre et al., 1987, Proc. Natl. Acad. Sci. 84:648-652; PCT Publication No. WO88/09810, published Dec. 15, 1988) or the blood-brain barrier (see, e.g., PCT Publication No. WO89/10134, published Apr. 25, 1988), hybridization-triggered cleavage agents. (See, e.g., Krol et al., 1988, BioTechniques 6:958-976) or intercalating agents. (See, e.g., Zon, 1988, Pharm. Res. 5:539-549). To this end, the oligonucleotide may be conjugated to another molecule, e.g., a peptide, hybridization triggered cross-linking, agent, transport agent, hybridization-triggered cleavage agent, etc.

[0630] The antisense oligonucleotide may comprise at least one modified base moiety which is selected from the group including, but not limited to, 5-fluorouracil, 5-bromouracil, 5-chlorouracil, 5-iodouracil, hypoxanthine, xantine, 4-acetylcytosine, 5-(carboxyhydroxylmethyl) uracil, 5-carboxymethylaminomethyl-2-thiouridine, 5-carboxymethylaminomethyluracil, dihydrouracil, beta-D-galactosylqueosine, inosine, N6-isopentenyladenine, 1-methylguanine, 1-methylinosine, 2,2-dimethylguanine, 2-methyladenine, 2-methylguanine, 3-methylcytosine, 5-methylcytosine, N6-adenine, 7-methylguanine, 5-methylaminomethyluracil, 5-methoxyaminomethyl-2-thiouracil, beta-D-mannosylqueosine, 5′-methoxycarboxymethyluracil, 5-methoxyuracil, 2-methylthio-N6-isopentenyladenine, uracil-5-oxyacetic acid (v), wybutoxosine, pseudouracil, queosine, 2-thiocytosine, 5-methyl-2-thiouracil, 2-thiouracil, 4-thiouracil, 5-methyluracil, uracil-5-oxyacetic acid methylester, uracil-5-oxyacetic acid (v), 5-methyl-2-thiouracil, 3-(3-amino-3-N-2-carboxypropyl) uracil, (acp3)w, and 2,6-diaminopurine.

[0631] The antisense oligonucleotide may also comprise at least one modified sugar moiety selected from the group including, but not limited to, arabinose, 2-fluoroarabinose, xylulose, and hexose.

[0632] In yet another embodiment, the antisense oligonucleotide comprises at least one modified phosphate backbone selected from the group including, but not limited to, a phosphorothioate, a phosphorodithioate, a phosphoramidothioate, a phosphoramidate, a phosphordiamidate, a methylphosphonate, an alkyl phosphotriester, and a formacetal or analog thereof.

[0633] In yet another embodiment, the antisense oligonucleotide is an a-anomeric oligonucleotide. An a-anomeric oligonucleotide forms specific double-stranded hybrids with complementary RNA in which, contrary to the usual b-units, the strands run parallel to each other (Gautier et al., 1987, Nucl. Acids Res. 15:6625-6641). The oligonucleotide is a 2′-0-methylribonucleotide (Inoue et al., 1987, Nucl. Acids Res. 15:6131-6148), or a chimeric RNA-DNA analogue (Inoue et al., 1987, FEBS Lett. 215:327-330).

[0634] Polynucleotides of the invention may be synthesized by standard methods known in the art, e.g. by use of an automated DNA synthesizer (such as are commercially available from Biosearch, Applied Biosystems, etc.). As examples, phosphorothioate oligonucleotides may be synthesized by the method of Stein et al. (1988, Nucl. Acids Res. 16:3209), methylphosphonate oligonucleotides can be prepared by use of controlled pore glass polymer supports (Sarin et al., 1988, Proc. Natl. Acad. Sci. U.S.A. 85:7448-7451), etc.

[0635] While antisense nucleotides complementary to the coding region sequence could be used, those complementary to the transcribed untranslated region are most preferred.

[0636] Potential antagonists according to the invention also include catalytic RNA, or a ribozyme (See, e.g., PCT International Publication WO 90/11364, published Oct. 4, 1990; Sarver et al, Science 247:1222-1225 (1990). While ribozymes that cleave mRNA at site specific recognition sequences can be used to destroy mRNAs, the use of hammerhead ribozymes is preferred. Hammerhead ribozymes cleave mRNAs at locations dictated by flanking regions that form complementary base pairs with the target mRNA. The sole requirement is that the target mRNA have the following sequence of two bases: 5′-UG-3′. The construction and production of hammerhead ribozymes is well known in the art and is described more fully in Haseloff and Gerlach, Nature 334:585-591 (1988). There are numerous potential hammerhead ribozyme cleavage sites within the nucleotide sequence of SEQ D NO:X. Preferably, the ribozyme is engineered so that the cleavage recognition site is located near the 5′ end of the mRNA; i.e., to increase efficiency and minimize the intracellular accumulation of non-functional mRNA transcripts.

[0637] As in the antisense approach, the ribozymes of the invention can be composed of modified oligonucleotides (e.g., for improved stability, targeting, etc.) and should be delivered to cells which express in vivo. DNA constructs encoding the ribozyme may be introduced into the cell in the same manner as described above for the introduction of antisense encoding DNA. A preferred method of delivery involves using a DNA construct “encoding” the ribozyme under the control of a strong constitutive promoter, such as, for example, pol III or pol II promoter, so that transfected cells will produce sufficient quantities of the ribozyme to destroy endogenous messages and inhibit translation. Since ribozymes unlike antisense molecules, are catalytic, a lower intracellular concentration is required for efficiency.

[0638] Antagonist/agonist compounds may be employed to inhibit the cell growth and proliferation effects of the polypeptides of the present invention on neoplastic cells and tissues, i.e. stimulation of angiogenesis of tumors, and, therefore, retard or prevent abnormal cellular growth and proliferation, for example, in tumor formation or growth.

[0639] The antagonist/agonist may also be employed to prevent hyper-vascular diseases, and prevent the proliferation of epithelial lens cells after extracapsular cataract surgery. Prevention of the mitogenic activity of the polypeptides of the present invention may also be desirous in cases such as restenosis after balloon angioplasty.

[0640] The antagonist/agonist may also be employed to prevent the growth of scar tissue during wound healing.

[0641] The antagonist/agonist may also be employed to treat the diseases described herein.

[0642] Thus, the invention provides a method of treating disorders or diseases, including but not limited to the disorders or diseases listed throughout this application, associated with overexpression of a polynucleotide of the present invention by administering to a patient (a) an antisense molecule directed to the polynucleotide of the present invention, and/or (b) a ribozyme directed to the polynucleotide of the present invention.

[0643] Binding Peptides and Other Molecules

[0644] The invention also encompasses screening methods for identifying polypeptides and nonpolypeptides that bind polypeptides of the invention, and the binding molecules identified thereby. These binding molecules are useful, for example, as agonists and antagonists of the polypeptides of the invention. Such agonists and antagonists can be used, in accordance with the invention, in the therapeutic embodiments described in detail, below.

[0645] This method comprises the steps of:
[0646] contacting polypeptides of the invention with a plurality of molecules; and
[0647] identifying a molecule that binds the polypeptides of the invention.

[0648] The step of contacting the polypeptides of the invention with the plurality of molecules may be effected in a number of ways. For example, one may contemplate immobilizing the polypeptides on a solid support and bringing a solution of the plurality of molecules in contact with the immobilized polypeptides. Such a procedure would be akin to an affinity chromatographic process, with the affinity matrix being comprised of the immobilized polypeptides of the invention. The molecules having a selective affinity for the polypeptides can then be purified by affinity selection. The nature of the solid support, process for attachment of the polypeptides to the solid support, solvent, and conditions of the affinity isolation or selection are largely conventional and well known to those of ordinary skill in the art.

[0649] Alternatively, one may also separate a plurality of polypeptides into substantially separate fractions comprising a subset of or individual polypeptides. For instance, one can separate the plurality of polypeptides by gel electrophoresis, column chromatography, or like method known to those of ordinary skill for the separation of polypeptides. The individual polypeptides can also be produced by a transformed host cell in such a way as to be expressed on or about its outer surface (e.g., a recombinant phage). Individual isolates can then be “probed” by the polypeptides of the invention, optionally in the presence of an inducer should one be required for expression, to determine if any selective affinity interaction takes place between the polypeptides and the individual clone. Prior to contacting the polypeptides with each fraction comprising individual polypeptides, the polypeptides could first be transferred to a solid support for additional convenience. Such a solid support may simply be a piece of filter membrane, such as one made of nitrocellulose or nylon. In this manner, positive clones could be identified from a collection of transformed host cells of an expression library, which harbor a DNA construct encoding a polypeptide having a selective affinity for polypeptides of the invention. Furthermore, the amino acid sequence of the polypeptide having a selective affinity for the polypeptides of the invention can be determined directly by conventional means or the coding sequence of the DNA encoding the polypeptide can frequently be determined more conveniently. The primary sequence can then be deduced from the corresponding DNA sequence. If the amino acid sequence is to be determined from the polypeptide itself, one may use microsequencing techniques. The sequencing technique may include mass spectroscopy.

[0650] In certain situations, it may be desirable to wash away any unbound polypeptides from a mixture of the polypeptides of the invention and the plurality of polypeptides prior to attempting to determine or to detect the presence of a selective affinity interaction. Such a wash step may be particularly desirable when the polypeptides of the invention or the plurality of polypeptides are bound to a solid support.

[0651] The plurality of molecules provided according to this method may be provided by way of diversity libraries, such as random or combinatorial peptide or nonpeptide libraries which can be screened for molecules that specifically bind polypeptides of the invention. Many libraries are known in the art that can be used, e.g., chemically synthesized libraries, recombinant (e.g., phage display libraries), and in vitro translation-based libraries. Examples of chemically synthesized libraries are described in Fodor et al., 1991, Science 251:767-773; Houghten et al., 1991, Nature 354:84-86; Lam et al., 1991, Nature 354:82-84; Medynsid, 1994, Bio/Technology 12:709-710;Gallop et al., 1994, J. Medicinal Chemistry 37(9):1233-1251; Ohlmeyer et al., 1993, Proc. Natl. Acad. Sci. USA 90:10922-10926; Erb et al., 1994, Proc. Natl. Acad. Sci. USA 91:11422-11426; Houghten et al., 1992, Biotechniques 13:412; Jayawickreme et al., 1994, Proc. Natl. Acad. Sci. USA 91:1614-1618; Salmon et al., 1993, Proc. Natl. Acad. Sci. USA 90:11708-11712; PCT Publication No. WO 93/20242; and Brenner and Lerner, 1992, Proc. Natl. Acad. Sci. USA 89:5381-5383.

[0652] Examples of phage display libraries are described in Scott and Smith, 1990, Science 249:386-390; Devlin et al., 1990, Science, 249:404-406; Christian, R. B., et al., 1992, J. Mol. Biol. 227:711-718); Lenstra, 1992, J. Immunol. Meth. 152:149-157; Kay et al., 1993, Gene 128:59-65; and PCT Publication No. WO 94/18318 dated Aug. 18, 1994.

[0653] In vitro translation-based libraries include but are not limited to those described in PCT Publication No. WO 91/05058 dated Apr. 18, 1991; and Matthealis et al., 1994, Proc. Natl. Acad. Sci. USA 91:9022-9026.

[0654] By way of examples of nonpeptide libraries, a benzodiazepine library (see e.g., Bunin et al., 1994, Proc. Natl. Acad. Sci. USA 91:4708-4712) can be adapted for use. Peptoid libraries (Simon et al., 1992, Proc. Natl. Acad. Sci. USA 89:9367-9371) can also be used. Another example of a library that can be used, in which the amide functionalities in peptides have been permethylated to generate a chemically transformed combinatorial library, is described by Ostresh et al. (1994, Proc. Natl. Acad. Sci. USA 91:11138-11142).

[0655] The variety of non-peptide libraries that are useful in the present invention is great. For example, Ecker and Crooke, 1995, Bio/Technology 13:351-360 list benzodiazepines, hydantoins, piperazinediones, biphenyls, sugar analogs, beta-mercaptoketones, arylacetic acids, acylpiperidines, benzopyrans, cubanes, xanthines, aminimides, and oxazolones as among the chemical species that form the basis of various libraries.

[0656] Non-peptide libraries can be classified broadly into two types: decorated monomers and oligomers. Decorated monomer libraries employ a relatively simple scaffold structure upon which a variety functional groups is added. Often the scaffold will be a molecule with a known useful pharmacological activity. For example, the scaffold might be the benzodiazepine structure.

[0657] Non-peptide oligomer libraries utilize a large number of monomers that are assembled together in ways that create new shapes that depend on the order of the monomers. Among the monomer units that have been used are carbamates, pyrrolinones, and morpholinos. Peptoids, peptide-like oligomers in which the side chain is attached to the alpha amino group rather than the alpha carbon, form the basis of another version of non-peptide oligomer libraries. The first non-peptide oligomer libraries utilized a single type of monomer and thus contained a repeating backbone. Recent libraries have utilized more than one monomer, giving the libraries added flexibility.

[0658] Screening the libraries can be accomplished by any of a variety of commonly known methods. See, e.g., the following references, which disclose screening of peptide libraries: Parmley and Smith, 1989, Adv. Exp. Med. Biol. 251:215-218; Scott and Smith, 1990, Science 249:386-390; Fowlkes et al., 1992; BioTechniques 13:422-427; Oldenburg et al., 1992, Proc. Natl. Acad. Sci. USA 89:5393-5397; Yu et al., 1994, Cell 76:933-945; Staudt et al., 1988, Science 241:577-580; Bock et al., 1992, Nature 355:564-566; Tuerk et al., 1992, Proc. Natl. Acad. Sci. USA 89:6988-6992; Ellington et al., 1992, Nature 355:850-852; U.S. Pat. No. 5,096,815, U.S. Pat. No. 5,223,409, and U.S. Pat. No. 5,198,346, all to Ladner et al.; Rebar and Pabo, 1993, Science 263:671-673; and CT Publication No. WO 94/18318.

[0659] In a specific embodiment, screening to identify a molecule that binds polypeptides of the invention can be carried out by contacting the library members with polypeptides of the invention immobilized on a solid phase and harvesting those library members that bind to the polypeptides of the invention. Examples of such screening methods, termed “panning” techniques are described by way of example in Parmley and Smith, 1988, Gene 73:305-318; Fowlkes et al., 1992, BioTechniques 13:422-427; PCT Publication No. WO 94/18318; and in references cited herein.

[0660] In another embodiment, the two-hybrid system for selecting interacting proteins in yeast (Fields and Song, 1989, Nature 340:245-246; Chien et al., 1991, Proc. Natl. Acad. Sci. USA 88:9578-9582) can be used to identify molecules that specifically bind to polypeptides of the invention.

[0661] Where the binding molecule is a polypeptide, the polypeptide can be conveniently selected from any peptide library, including random peptide libraries, combinatorial peptide libraries, or biased peptide libraries. The term “biased” is used herein to mean that the method of generating the library is manipulated so as to restrict one or more parameters that govern the diversity of the resulting collection of molecules, in this case peptides.

[0662] Thus, a truly random peptide library would generate a collection of peptides in which the probability of finding a particular amino acid at a given position of the peptide is the same for all 20 amino acids. A bias can be introduced into the library, however, by specifying, for example, that a lysine occur every fifth amino acid or that positions 4, 8, and 9 of a decapeptide library be fixed to include only arginine. Clearly, many types of biases can be contemplated, and the present invention is not restricted to any particular bias. Furthermore, the present invention contemplates specific types of peptide libraries, such as phage displayed peptide libraries and those that utilize a DNA construct comprising a lambda phage vector with a DNA insert.

[0663] As mentioned above, in the case of a binding molecule that is a polypeptide, the polypeptide may have about 6 to less than about 60 amino acid residues, preferably about 6 to about 10 amino acid residues, and most preferably, about 6 to about 22 amino acids. In another embodiment, a binding polypeptide has in the range of 15-100 amino acids, or 20-50 amino acids.

[0664] The selected binding polypeptide can be obtained by chemical synthesis or recombinant expression.

[0665] Other Activities

[0666] A polypeptide, polynucleotide, agonist, or antagonist of the present invention, as a result of the ability to stimulate vascular endothelial cell growth, may be employed in treatment for stimulating re-vascularization of ischemic tissues due to various disease conditions such as thrombosis, arteriosclerosis, and other cardiovascular conditions. The polypeptide, polynucleotide, agonist, or antagonist of the present invention may also be employed to stimulate angiogenesis and limb regeneration, as discussed above.

[0667] A polypeptide, polynucleotide, agonist, or antagonist of the present invention may also be employed for treating wounds due to injuries, burns, post-operative tissue repair, and ulcers since they are mitogenic to various cells of different origins, such as fibroblast cells and skeletal muscle cells, and therefore, facilitate the repair or replacement of damaged or diseased tissue.

[0668] A polypeptide, polynucleotide, agonist, or antagonist of the present invention may also be employed stimulate neuronal growth and to treat and prevent neuronal damage which occurs in certain neuronal disorders or neuro-degenerative conditions such as Alzheimer's disease, Parkinson's disease, and AIDS-related complex. A polypeptide, polynucleotide, agonist, or antagonist of the present invention may have the ability to stimulate chondrocyte growth, therefore, they may be employed to enhance bone and periodontal regeneration and aid in tissue transplants or bone grafts.

[0669] A polypeptide, polynucleotide, agonist, or antagonist of the present invention may be also be employed to prevent skin aging due to sunburn by stimulating keratinocyte growth.

[0670] A polypeptide, polynucleotide, agonist, or antagonist of the present invention may also be employed for preventing hair loss, since FGF family members activate hair-forming cells and promotes melanocyte growth. Along the same lines, a polypeptide, polynucleotide, agonist, or antagonist of the present invention may be employed to stimulate growth and differentiation of hematopoietic cells and bone marrow cells when used in combination with other cytokines.

[0671] A polypeptide, polynucleotide, agonist, or antagonist of the present invention may also be employed to maintain organs before transplantation or for supporting cell culture of primary tissues. A polypeptide, polynucleotide, agonist, or antagonist of the present invention may also be employed for inducing tissue of mesodermal origin to differentiate in early embryos.

[0672] A polypeptide, polynucleotide, agonist, or antagonist of the present invention may also increase or decrease the differentiation or proliferation of embryonic stem cells, besides, as discussed above, hematopoietic lineage.

[0673] A polypeptide, polynucleotide, agonist, or antagonist of the present invention may also be used to modulate mammalian characteristics, such as body height, weight, hair color, eye color, skin, percentage of adipose tissue, pigmentation, size, and shape (e.g., cosmetic surgery). Similarly, a polypeptide, polynucleotide, agonist, or antagonist of the present invention may be used to modulate mammalian metabolism affecting catabolism, anabolism, processing, utilization, and storage of energy.

[0674] A polypeptide, polynucleotide, agonist, or antagonist of the present invention may be used to change a mammal's mental state or physical state by influencing biorhythms, caricadic rhythms, depression (including depressive disorders), tendency for violence, tolerance for pain, reproductive capabilities (preferably by Activin or Inhibin-like activity), hormonal or endocrine levels, appetite, libido, memory, stress, or other cognitive qualities.

[0675] A polypeptide, polynucleotide, agonist, or antagonist of the present invention may also be used as a food additive or preservative, such as to increase or decrease storage capabilities, fat content, lipid, protein, carbohydrate, vitamins, minerals, cofactors or other nutritional components.

[0676] The above-recited applications have uses in a wide variety of hosts. Such hosts include, but are not limited to, human, murine, rabbit, goat, guinea pig, camel, horse, mouse, rat, hamster, pig, micro-pig, chicken, goat, cow, sheep, dog, cat, non-human primate, and human. In specific embodiments, the host is a mouse, rabbit, goat, guinea pig, chicken, rat, hamster, pig, sheep, dog or cat. In preferred embodiments, the host is a mammal. In most preferred embodiments, the host is a human.

[0677] Other Preferred Embodiments

[0678] Other preferred embodiments of the claimed invention include an isolated nucleic acid molecule comprising a nucleotide sequence which is at least 95% identical to a sequence of at least about 50 contiguous nucleotides in the nucleotide sequence of SEQ ID NO:X or the complementary strand thereto, the nucleotide sequence as defined in Table 1B or columns 8 and 9 of Table 2 or the complementary strand thereto, and/or cDNA contained in ATCC Deposit No:Z.

[0679] Also preferred is a nucleic acid molecule wherein said sequence of contiguous nucleotides is included in the nucleotide sequence of the portion of SEQ ID NO:X as defined in column 5, “ORF (From-To)”, in Table 1B.1.

[0680] Also preferred is a nucleic acid molecule wherein said sequence of contiguous nucleotides is included in the nucleotide sequence of the portion of SEQ ID NO:X as defined in columns 8 and 9, “NT From” and “NT To” respectively, in Table 2.

[0681] Also preferred is an isolated nucleic acid molecule comprising a nucleotide sequence which is at least 95% identical to a sequence of at least about 150 contiguous nucleotides in the nucleotide sequence of SEQ ID NO:X or the complementary strand thereto, the nucleotide sequence as defined in Table 1B or columns 8 and 9 of Table 2 or the complementary strand thereto, and/or cDNA contained in ATCC Deposit No:Z.

[0682] Further preferred is an isolated nucleic acid molecule comprising a nucleotide sequence which is at least 95% identical to a sequence of at least about 500 contiguous nucleotides in the nucleotide sequence of SEQ ID NO:X or the complementary strand thereto, the nucleotide sequence as defined in Table 1B or columns 8 and 9 of Table 2 or the complementary strand thereto, and/or cDNA contained in ATCC Deposit No:Z.

[0683] A further preferred embodiment is a nucleic acid molecule comprising a nucleotide sequence which is at least 95% identical to the nucleotide sequence of the portion of SEQ ID NO:X defined in column 5, “ORF (From-To)”, in Table 1B.1.

[0684] A further preferred embodiment is a nucleic acid molecule comprising a nucleotide sequence which is at least 95% identical to the nucleotide sequence of the portion of SEQ ID NO:X defined in columns 8 and 9, “NT From” and “NT To”, respectively, in Table 2.

[0685] A further preferred embodiment is an isolated nucleic acid molecule comprising a nucleotide sequence which is at least 95% identical to the complete nucleotide sequence of SEQ ID NO:X or the complementary strand thereto, the nucleotide sequence as defined in column 5 of Table 1B.1 or columns 8 and 9 of Table 2 or the complementary strand thereto, and/or cDNA contained in ATCC Deposit No:Z.

[0686] Also preferred is an isolated nucleic acid molecule which hybridizes under stringent hybridization conditions to a nucleic acid molecule comprising a nucleotide sequence of SEQ ID NO:X or the complementary strand thereto, the nucleotide sequence as defined in column 5 of Table 1B.1 or columns 8 and 9 of Table 2 or the complementary strand thereto, and/or cDNA contained in ATCC Deposit No:Z, wherein said nucleic acid molecule which hybridizes does not hybridize under stringent hybridization conditions to a nucleic acid molecule having a nucleotide sequence consisting of only A residues or of only T residues.

[0687] Also preferred is a composition of matter comprising a DNA molecule which comprises the cDNA contained in ATCC Deposit No:Z.

[0688] Also preferred is an isolated nucleic acid molecule comprising a nucleotide sequence which is at least 95% identical to a sequence of at least 50 contiguous nucleotides of the cDNA sequence contained in ATCC Deposit No:Z.

[0689] Also preferred is an isolated nucleic acid molecule, wherein said sequence of at least 50 contiguous nucleotides is included in the nucleotide sequence of an open reading frame sequence encoded by cDNA contained in ATCC Deposit No:Z.

[0690] Also preferred is an isolated nucleic acid molecule comprising a nucleotide sequence which is at least 95% identical to sequence of at least 150 contiguous nucleotides in the nucleotide sequence encoded by cDNA contained in ATCC Deposit No:Z.

[0691] A further preferred embodiment is an isolated nucleic acid molecule comprising a nucleotide sequence which is at least 95% identical to sequence of at least 500 contiguous nucleotides in the nucleotide sequence encoded by cDNA contained in ATCC Deposit No:Z.

[0692] A further preferred embodiment is an isolated nucleic acid molecule comprising a nucleotide sequence which is at least 95% identical to the complete nucleotide sequence encoded by cDNA contained in ATCC Deposit No:Z.

[0693] A further preferred embodiment is a method for detecting in a biological sample a nucleic acid molecule comprising a nucleotide sequence which is at least 95% identical to a sequence of at least 50 contiguous nucleotides in a sequence selected from the group consisting of: a nucleotide sequence of SEQ ID NO:X or the complementary strand thereto; the nucleotide sequence as defined in column 5 of Table 1B.1 or columns 8 and 9 of Table 2 or the complementary strand thereto; and a nucleotide sequence encoded by cDNA contained in ATCC Deposit No:Z; which method comprises a step of comparing a nucleotide sequence of at least one nucleic acid molecule in said sample with a sequence selected from said group and determining whether the sequence of said nucleic acid molecule in said sample is at least 95% identical to said selected sequence.

[0694] Also preferred is the above method wherein said step of comparing sequences comprises determining the extent of nucleic acid hybridization between nucleic acid molecules in said sample and a nucleic acid molecule comprising said sequence selected from said group. Similarly, also preferred is the above method wherein said step of comparing sequences is performed by comparing the nucleotide sequence determined from a nucleic acid molecule in said sample with said sequence selected from said group. The nucleic acid molecules can comprise DNA molecules or RNA molecules.

[0695] A further preferred embodiment is a method for identifying the species, tissue or cell type of a biological sample which method comprises a step of detecting nucleic acid molecules in said sample, if any, comprising a nucleotide sequence that is at least 95% identical to a sequence of at least 50 contiguous nucleotides in a sequence selected from the group consisting of: a nucleotide sequence of SEQ ID NO:X or the complementary strand thereto; the nucleotide sequence as defined in column 5 of Table 1B.1 or columns 8 and 9 of Table 2 or the complementary strand thereto; and a nucleotide sequence of the cDNA contained in ATCC Deposit No:Z.

[0696] The method for identifying the species, tissue or cell type of a biological sample can comprise a step of detecting nucleic acid molecules comprising a nucleotide sequence in a panel of at least two nucleotide sequences, wherein at least one sequence in said panel is at least 95% identical to a sequence of at least 50 contiguous nucleotides in a sequence selected from said group.

[0697] Also preferred is a method for diagnosing in a subject a pathological condition associated with abnormal structure or expression of a nucleotide sequence of SEQ ID NO:X or the complementary strand thereto; the nucleotide sequence as defined in column 5 of Table 1B.1 or columns 8 and 9 of Table 2 or the complementary strand thereto; or the cDNA contained in ATCC Deposit No:Z which encodes a protein, wherein the method comprises a step of detecting in a biological sample obtained from said subject nucleic acid molecules, if any, comprising a nucleotide sequence that is at least 95% identical to a sequence of at least 50 contiguous nucleotides in a sequence selected from the group consisting of: a nucleotide sequence of SEQ ID NO:X or the complementary strand thereto; the nucleotide sequence as defined in column 5 of Table 1B.1 or columns 8 and 9 of Table 2 or the complementary strand thereto; and a nucleotide sequence of cDNA contained in ATCC Deposit No:Z.

[0698] The method for diagnosing a pathological condition can comprise a step of detecting nucleic acid molecules comprising a nucleotide sequence in a panel of at least two nucleotide sequences, wherein at least one sequence in said panel is at least 95% identical to a sequence of at least 50 contiguous nucleotides in a sequence selected from said group.

[0699] Also preferred is a composition of matter comprising isolated nucleic acid molecules wherein the nucleotide sequences of said nucleic acid molecules comprise a panel of at least two nucleotide sequences, wherein at least one sequence in said panel is at least 95% identical to a sequence of at least 50 contiguous nucleotides in a sequence selected from the group consisting of: a nucleotide sequence of SEQ ID NO:X or the complementary strand thereto; the nucleotide sequence as defined in column 5 of Table 1B.1 or columns 8 and 9 of Table 2 or the complementary strand thereto; and a nucleotide sequence encoded by cDNA contained in ATCC Deposit No:Z. The nucleic acid molecules can comprise DNA molecules or RNA molecules.

[0700] Also preferred is a composition of matter comprising isolated nucleic acid molecules wherein the nucleotide sequences of said nucleic acid molecules comprise a DNA microarray or “chip” of at least 1, 2, 3, 4, 5, 6, 7, 8, 9, 10, 15, 20, 25, 30, 40, 50, 100, 150, 200, 250, 300, 500, 1000, 2000, 3000, or 4000 nucleotide sequences, wherein at least one sequence in said DNA microarray or “chip” is at least 95% identical to a sequence of at least 50 contiguous nucleotides in a sequence selected from the group consisting of: a nucleotide sequence of SEQ ID NO:X wherein X is any integer as defined in Table 1A and/or 1B; and a nucleotide sequence encoded by a human cDNA clone identified by a cDNA “Clone ID” in Table 1A and/or 1B.

[0701] Also preferred is an isolated polypeptide comprising an amino acid sequence at least 90% identical to a sequence of at least about 10 contiguous amino acids in the polypeptide sequence of SEQ ID NO:Y; a polypeptide encoded by SEQ ID NO:X or the complementary strand thereto; the polypeptide encoded by the nucleotide sequence as defined in columns 8 and 9 of Table 2; and/or a polypeptide encoded by cDNA contained in ATCC Deposit No:Z.

[0702] Also preferred is an isolated polypeptide comprising an amino acid sequence at least 95% identical to a sequence of at least about 30 contiguous amino acids in the amino acid sequence of SEQ ID NO:Y; a polypeptide encoded by SEQ ID NO:X or the complementary strand thereto; the polypeptide encoded by the nucleotide sequence as defined in columns 8 and 9 of Table 2; and/or a polypeptide encoded by cDNA contained in ATCC Deposit No:Z.

[0703] Further preferred is an isolated polypeptide comprising an amino acid sequence at least 95% identical to a sequence of at least about 100 contiguous amino acids in the amino acid sequence of SEQ ID NO:Y; a polypeptide encoded by SEQ ID NO:X or the complementary strand thereto; the polypeptide encoded by the nucleotide sequence as defined in columns 8 and 9 of Table 2; and/or a polypeptide encoded by cDNA contained in ATCC Deposit No:Z.

[0704] Further preferred is an isolated polypeptide comprising an amino acid sequence at least 95% identical to the complete amino acid sequence of SEQ ID NO:Y; a polypeptide encoded by SEQ ID NO:X or the complementary strand thereto; the polypeptide encoded by the nucleotide sequence as defined in columns 8 and 9 of Table 2; and/or a polypeptide encoded by cDNA contained in ATCC Deposit No:Z.

[0705] Further preferred is an isolated polypeptide comprising an amino acid sequence at least 90% identical to a sequence of at least about 10 contiguous amino acids in the complete amino acid sequence of a polypeptide encoded by contained in ATCC Deposit No:Z

[0706] Also preferred is a polypeptide wherein said sequence of contiguous amino acids is included in the amino acid sequence of a portion of said polypeptide encoded by cDNA contained in ATCC Deposit No:Z; a polypeptide encoded by SEQ ID NO:X or the complementary strand thereto; the polypeptide encoded by the nucleotide sequence as defined in columns 8, and 9 of Table 2; and/or the polypeptide sequence of SEQ ID NO:Y.

[0707] Also preferred is an isolated polypeptide comprising an amino acid sequence at least 95% identical to a sequence of at least about 30 contiguous amino acids in the amino acid sequence of a polypeptide encoded by the cDNA contained in ATCC Deposit No:Z.

[0708] Also preferred is an isolated polypeptide comprising an amino acid sequence at least 95% identical to a sequence of at least about 100 contiguous amino acids in the amino acid sequence of a polypeptide encoded by cDNA contained in ATCC Deposit No:Z.

[0709] Also preferred is an isolated polypeptide comprising an amino acid sequence at least 95% identical to the amino acid sequence of a polypeptide encoded by the cDNA contained in ATCC Deposit No:Z.

[0710] Further preferred is an isolated antibody which binds specifically to a polypeptide comprising an amino acid sequence that is at least 90% identical to a sequence of at least 10 contiguous amino acids in a sequence selected from the group consisting of: a polypeptide sequence of SEQ ID NO:Y; a polypeptide encoded by SEQ ID NO:X or the complementary strand thereto; the polypeptide encoded by the nucleotide sequence as defined in columns 8 and 9 of Table 2; and a polypeptide encoded by the cDNA contained in ATCC Deposit No:Z.

[0711] Further preferred is a method for detecting in a biological sample a polypeptide comprising an amino acid sequence which is at least 90% identical to a sequence of at least 10 contiguous amino acids in a sequence selected from the group consisting of: a polypeptide sequence of SEQ ID NO:Y; a polypeptide encoded by SEQ ID NO:X or the complementary strand thereto; the polypeptide encoded by the nucleotide sequence as defined in columns 8 and 9 of Table 2; and a polypeptide encoded by the cDNA contained in ATCC Deposit No:Z; which method comprises a step of comparing an amino acid sequence of at least one polypeptide molecule in said sample with a sequence selected from said group and determining whether the sequence of said polypeptide molecule in said sample is at least 90% identical to said sequence of at least 10 contiguous amino acids.

[0712] Also preferred is the above method wherein said step of comparing an amino acid sequence of at least one polypeptide molecule in said sample with a sequence selected from said group comprises determining the extent of specific binding of polypeptides in said sample to an antibody which binds specifically to a polypeptide comprising an amino acid sequence that is at least 90% identical to a sequence of at least 10 contiguous amino acids in a sequence selected from the group consisting of: a polypeptide sequence of SEQ ID NO:Y; a polypeptide encoded by SEQ ID NO:X or the complementary strand thereto; the polypeptide encoded by the nucleotide sequence as defined in columns 8 and 9 of Table 2; and a polypeptide encoded by the cDNA contained in ATCC Deposit No:Z.

[0713] Also preferred is the above method wherein said step of comparing sequences is performed by comparing the amino acid sequence determined from a polypeptide molecule in said sample with said sequence selected from said group.

[0714] Also preferred is a method for identifying the species, tissue or cell type of a biological sample which method comprises a step of detecting polypeptide molecules in said sample, if any, comprising an amino acid sequence that is at least 90% identical to a sequence of at least 10 contiguous amino acids in a sequence selected from the group consisting of: polypeptide sequence of SEQ ID NO:Y; a polypeptide encoded by SEQ ID NO:X or the complementary strand thereto; the polypeptide encoded by the nucleotide sequence as defined in columns 8 and 9 of Table 2; and a polypeptide encoded by the cDNA contained in ATCC Deposit No:Z.

[0715] Also preferred is the above method for identifying the species, tissue or cell type of a biological sample, which method comprises a step of detecting polypeptide molecules comprising an amino acid sequence in a panel of at least two amino acid sequences, wherein at least one sequence in said panel is at least 90% identical to a sequence of at least 10 contiguous amino acids in a sequence selected from the above group.

[0716] Also preferred is a method for diagnosing in a subject a pathological condition associated with abnormal structure or expression of a nucleic acid sequence identified in Table 1A, 1B or Table 2 encoding a polypeptide, which method comprises a step of detecting in a biological sample obtained from said subject polypeptide molecules comprising an amino acid sequence in a panel of at least two amino acid sequences, wherein at least one sequence in said panel is at least 90% identical to a sequence of at least 10 contiguous amino acids in a sequence selected from the group consisting of: polypeptide sequence of SEQ ID NO:Y; a polypeptide encoded by SEQ ID NO:X or the complementary strand thereto; the polypeptide encoded by the nucleotide sequence as defined in columns 8 and 9 of Table 2; and a polypeptide encoded by the cDNA contained in ATCC Deposit No:Z.

[0717] In any of these methods, the step of detecting said polypeptide molecules includes using an antibody.

[0718] Also preferred is an isolated nucleic acid molecule comprising a nucleotide sequence which is at least 95% identical to a nucleotide sequence encoding a polypeptide wherein said polypeptide comprises an amino acid sequence that is at least 90% identical to a sequence of at least 10 contiguous amino acids in a sequence selected from the group consisting of: polypeptide sequence of SEQ ID NO:Y; a polypeptide encoded by SEQ ID NO:X or the complementary strand thereto; the polypeptide encoded by the nucleotide sequence as defined in columns 8 and 9 of Table 2; and a polypeptide encoded by the cDNA contained in ATCC Deposit No:Z.

[0719] Also preferred is an isolated nucleic acid molecule, wherein said nucleotide sequence encoding a polypeptide has been optimized for expression of said polypeptide in a prokaryotic host.

[0720] Also preferred is a polypeptide molecule, wherein said polypeptide comprises an amino acid sequence selected from the group consisting of: polypeptide sequence of SEQ ID NO:Y; a polypeptide encoded by SEQ ID NO:X or the complementary strand thereto; the polypeptide encoded by the nucleotide sequence as defined in columns 8 and 9 of Table 2; and a polypeptide encoded by the cDNA contained in ATCC Deposit No:Z.

[0721] Further preferred is a method of making a recombinant vector comprising inserting any of the above isolated nucleic acid molecule into a vector. Also preferred is the recombinant vector produced by this method. Also preferred is a method of making a recombinant host cell comprising introducing the vector into a host cell, as well as the recombinant host cell produced by this method.

[0722] Also preferred is a method of making an isolated polypeptide comprising culturing this recombinant host cell under conditions such that said polypeptide is expressed and recovering said polypeptide. Also preferred is this method of making an isolated polypeptide, wherein said recombinant host cell is a eukaryotic cell and said polypeptide is a human protein comprising an amino acid sequence selected from the group consisting of: polypeptide sequence of SEQ ID NO:Y; a polypeptide encoded by SEQ ID NO:X or the complementary strand thereto; the polypeptide encoded by the nucleotide sequence as defined in columns 8 and 9 of Table 2; and a polypeptide encoded by the cDNA contained in ATCC Deposit No:Z. The isolated polypeptide produced by this method is also preferred.

[0723] Also preferred is a method of treatment of an individual in need of an increased level of a protein activity, which method comprises administering to such an individual a Therapeutic comprising an amount of an isolated polypeptide, polynucleotide, immunogenic fragment or analogue thereof, binding agent, antibody, or antigen binding fragment of the claimed invention effective to increase the level of said protein activity in said individual.

[0724] Also preferred is a method of treatment of an individual in need of a decreased level of a protein activity, which method comprised administering to such an individual a Therapeutic comprising an amount of an isolated polypeptide, polynucleotide, immunogenic fragment or analogue thereof, binding agent, antibody, or antigen binding fragment of the claimed invention effective to decrease the level of said protein activity in said individual.

[0725] Also preferred is a method of treatment of an individual in need of a specific delivery of toxic compositions to diseased cells (e.g., tumors, leukemias or lymphomas), which method comprises administering to such an individual a Therapeutic comprising an amount of an isolated polypeptide of the invention, including, but not limited to a binding agent, or antibody of the claimed invention that are associated with toxin or cytotoxic prodrugs.

[0726] Having generally described the invention, the same will be more readily understood by reference to the following examples, which are provided by way of illustration and are not intended as limiting.

[0727] Description of Table 6

[0728] Table 6 summarizes some of the ATCC Deposits, Deposit dates, and ATCC designation numbers of deposits made with the ATCC in connection with the present application. These deposits were made in addition to those described in the Table 1A.

TABLE 6

| ATCC Deposits | Deposit Date | ATCC Designation Number |
|---|---|---|
| LP01, LP02, LP03, | May 20, 1997 | 209059, 209060, 209061, |
| LP04, LP05, LP06, | | 209062, 209063, 209064, |
| LP07, LP08, LP09, | | 209065, 209066, 209067, |
| LP10, LP11, | | 209068, 209069 |
| LP12 | Jan. 12, 1998 | 209579 |
| LP13 | Jan. 12, 1998 | 209578 |
| LP14 | Jul. 16, 1998 | 203067 |
| LP15 | Jul. 16, 1998 | 203068 |
| LP16 | Feb. 1, 1999 | 203609 |
| LP17 | Feb. 1, 1999 | 203610 |
| LP20 | Nov. 17, 1998 | 203485 |
| LP21 | Jun. 18, 1999 | PTA-252 |
| LP22 | Jun. 18, 1999 | PTA-253 |
| LP23 | Dec. 22, 1999 | PTA-1081 |

### EXAMPLES

### Example 1

### Isolation of a Selected cDNA Clone from the Deposited Sample

[0729] Each ATCC Deposit No:Z is contained in a plasmid vector. Table 7 identifies the vectors used to construct the cDNA library from which each clone was isolated. In many cases, the vector used to construct the library is a phage vector from which a plasmid has been excised. The following correlates the related plasmid for each phage vector used in constructing the cDNA library. For example, where a particular clone is identified in Table 7 as being isolated in the vector “Lambda Zap,” the corresponding deposited clone is in “pBluescript.”

| Vector Used to | Corresponding Deposited |
|---|---|
| Construct Library | Plasmid |
| Lambda Zap | pBluescript (pBS) |
| Uni-Zap XR | pBluescript (pBS) |
| Zap Express | pBK |
| lafmid BA | plafmid BA |
| pSport1 | pSport1 |
| pCMVSport 2.0 | pCMVSport 2.0 |
| pCMVSport 3.0 | pCMVSport 3.0 |
| pCR ® 2.1 | pCR ® 2.1 |

[0730] Vectors Lambda Zap (U.S. Pat. Nos. 5,128,256 and 5,286,636), Uni-Zap XR (U.S. Pat. Nos. 5,128, 256 and 5,286,636), Zap Express (U.S. Pat. Nos. 5,128,256 and 5,286,636), pBluescript (pBS) (Short, J. M. et al., Nucleic Acids Res. 16:7583-7600 (1988); Alting-Mees, M. A. and Short, J. M., Nucleic Acids Res. 17:9494 (1989)) and pBK (Alting-Mees, M. A. et al., Strategies 5:58-61 (1992)) are commercially available from Stratagene Cloning Systems, Inc., 11011 N. Torrey Pines Road, La Jolla, Calif., 92037. pBS contains an ampicillin resistance gene and pBK contains a neomycin resistance gene. Both can be transformed into E.coli strain XL-1 Blue, also available from Stratagene. pBS comes in 4 forms SK+, SK−, KS+ and KS. The S and K refers to the orientation of the polylinker to the T7 and T3 primer sequences which flank the polylinker region (“S” is for SacI and “K” is for KpnI which are the first sites on each respective end of the linker). “+” or “−” refer to the orientation of the f1 origin of replication (“ori”), such that in one orientation, single stranded rescue initiated from the f1 ori generates sense strand DNA and in the other, antisense.

[0731] Vectors pSport1, pCMVSport 2.0 and pCMVSport 3.0, were obtained from Life Technologies, Inc., P. O. Box 6009, Gaithersburg, Md. 20897. All Sport vectors contain an ampiclluin resistance gene and may be transformed into E. coli strain DH10B, also available from Life Technologies. (See, for instance, Gruber, C. E., et al., Focus 15:59 (1993)). Vector lafmid BA (Bento Soares, Columbia University, N.Y.) contains an ampicillin resistance gene and can be transformed into E. coli strain XL-1 Blue. Vector pCR®2.1, which is available from Invitrogen, 1600 Faraday Avenue, Carlsbad, Calif. 92008, contains an ampicillin resistance gene and may be transformed into E. coli strain DH10B, available from Life Technologies. (See, for instance, Clark, J. M., Nuc. Acids Res. 16:9677-9686 (1988) and Mead, D. et al., Bio/Technology 9: (1991)). Preferably, a polynucleotide of the present invention does not comprise the phage vector sequences identified for the particular clone in Table 7, as well as the corresponding plasmid vector sequences designated above.

[0732] The deposited material in the sample assigned the ATCC Deposit Number cited by reference to Table 1A, Table 2, Table 6 and Table 7 for any given cDNA clone also may contain one or more additional plasmids, each comprising a cDNA clone different from that given clone. Thus, deposits sharing the same ATCC Deposit Number contain at least a plasmid for each ATCC Deposit No:Z.

TABLE 7

| | | | ATCC |
|---|---|---|---|
| Libraries owned by Catalog | Catalog Description | Vector | Deposit |
| HUKA HUKB HUKC HUKD | Human Uterine Cancer | Lambda ZAP II | LP01 |
| HUKE HUKF HUKG | | | |
| HCNA HCNB | Human Colon | Lambda Zap II | LP01 |
| HFFA | Human Fetal Brain, random | Lambda Zap II | LP01 |
| | primed | | |
| HTWA | Resting T-Cell | Lambda ZAP II | LP01 |
| HBQA | Early Stage Human Brain, | Lambda ZAP II | LP01 |
| | random primed | | |
| HLMB HLMF HLMG HLMH | breast lymph node CDNA | Lambda ZAP II | LP01 |
| HLMI HLMJ HLMM HLMN | library | | |
| HCQA-HCQB | human colon cancer | Lamda ZAP II | LP01 |
| HMEA HMEC HMED HMEE | Human Microvascular | Lambda ZAP II | LP01 |
| HMEF HMEG HMEI HMEJ | Endothelial Cells, fract. A | | |
| HMEK HMEL | | | |
| HUSA HUSC | Human Umbilical Vein | Lambda ZAP II | LP01 |
| | Endothelial Cells, fract. A | | |
| HLQA HLQB | Hepatocellular Tumor | Lambda ZAP II | LP01 |
| HHGA HHGB HHGC HHGD | Hemangiopericytoma | Lambda ZAP II | LP01 |
| HSDM | Human Striatum Depression, re- | Lambda ZAP II | LP01 |
| | rescue | | |
| HUSH | H Umbilical Vein Endothelial | Lambda ZAP II | LP01 |
| | Cells, frac A, re-excision | | |
| HSGS | Salivary gland, subtracted | Lambda ZAP II | LP01 |
| HFXA HFXB HFXC HFXD | Brain frontal cortex | Lambda ZAP II | LP01 |
| HFXE HFXF HFXG HFXH | | | |
| HPQA HPQB HPQC | PERM TF274 | Lambda ZAP II | LP01 |
| HFXJ HFXK | Brain Frontal Cortex, re-excision | Lambda ZAP II | LP01 |
| HCWA HCWB HCWC HCWD | CD34 positive cells (Cord | ZAP Express | LP02 |
| HCWE HCWF HCWG HCWH | Blood) | | |
| HCWI HCWJ HCWK | | | |
| HCUA HCUB HCUC | CD34 depleted Buffy Coat | ZAP Express | LP02 |
| | (Cord Blood) | | |
| HRSM | A-14 cell line | ZAP Express | LP02 |
| HRSA | A1-CELL LINE | ZAP Express | LP02 |
| HCUD HCUE HCUF HCUG | CD34 depleted Buffy Coat | ZAP Express | LP02 |
| HCUH HCUI | (Cord Blood), re-excision | | |
| HBXE HBXF HBXG | H. Whole Brain #2, re-excision | ZAP Express | LP02 |
| HRLM | L8 cell line | ZAP Express | LP02 |
| HBXA HBXB HBXC HBXD | Human Whole Brain #2 - Oligo | ZAP Express | LP02 |
| | dT > 1.5 Kb | | |
| HUDA HUDB HUDC | Testes | ZAP Express | LP02 |
| HHTM HHTN HHTO | H. hypothalamus, frac A; re- | ZAP Express | LP02 |
| | excision | | |
| HHTL | H. hypothalamus, frac A | ZAP Express | LP02 |
| HASA HASD | Human Adult Spleen | Uni-ZAP XR | LP03 |
| HFKC HFKD HFKE HFKF | Human Fetal Kidney | Uni-ZAP XR | LP03 |
| HFKG | | | |
| HE8A HE8B HE8C HE8D | Human 8 Week Whole Embryo | Uni-ZAP XR | LP03 |
| HE8E HE8F HE8M HE8N | | | |
| HGBA HGBD HGBE HGBF | Human Gall Bladder | Uni-ZAP XR | LP03 |
| HGBG HGBH HGBI | | | |
| HLHA HLHB HLHC HLHD | Human Fetal Lung III | Uni-ZAP XR | LP03 |
| HLHE HLHF HLHG HLHH | | | |
| HLHQ | | | |
| HPMA HPMB HPMC HPMD | Human Placenta | Uni-ZAP XR | LP03 |
| HPME HPMF HPMG HPMH | | | |
| HPRA HPRB HPRC HPRD | Human Prostate | Uni-ZAP XR | LP03 |
| HSIA HSIC HSID HSIE | Human Adult Small Intestine | Uni-ZAP XR | LP03 |
| HTEA HTEB HTEC HTED | Human Testes | Uni-ZAP XR | LP03 |
| HTEE HTEF HTEG HTEH | | | |
| HTEI HTEJ HTEK | | | |
| HTPA HTPB HTPC HTPD | Human Pancreas Tumor | Uni-ZAP XR | LP03 |
| HTPE | | | |
| HTTA HTTB HTTC HTTD | Human Testes Tumor | Uni-ZAP XR | LP03 |
| HTTE HTTF | | | |
| HAPA HAPB HAPC HAPM | Human Adult Pulmonary | Uni-ZAP XR | LP03 |
| HETA HETB HETC HETD | Human Endometrial Tumor | Uni-ZAP XR | LP03 |
| HETE HETF HETG HETH | | | |
| HETI | | | |
| HHFB HHFC HHFD HHFE | Human Fetal Heart | Uni-ZAP XR | LP03 |
| HHFF HHFG HHFH HHFI | | | |
| HHPB HHPC HHPD HHPE | Human Hippocampus | Uni-ZAP XR | LP03 |
| HHPF HHPG HHPH | | | |
| HCE1 HCE2 HCE3 HCE4 | Human Cerebellum | Uni-ZAP XR | LP03 |
| HCE5 HCEB HCEC HCED | | | |
| HCEE HCEF HCEG | | | |
| HUVB HUVC HUVD HUVE | Human Umbilical Vein, Endo. | Uni-ZAP XR | LP03 |
| | remake | | |
| HSTA HSTB HSTC HSTD | Human Skin Tumor | Uni-ZAP XR | LP03 |
| HTAA HTAB HTAC HTAD | Human Activated T-Cells | Uni-ZAP XR | LP03 |
| HTAE | | | |
| HFEA HFEB HFEC | Human Fetal Epithelium (Skin) | Uni-ZAP XR | LP03 |
| HJPA HJPB HJPC HJPD | HUMAN JURKAT | Uni-ZAP XR | LP03 |
| | MEMBRANE BOUND | | |
| | POLYSOMES | | |
| HESA | Human epithelioid sarcoma | Uni-Zap XR | LP03 |
| HLTA HLTB HLTC HLTD | Human T-Cell Lymphoma | Uni-ZAP XR | LP03 |
| HLTE HLTF | | | |
| HFTA HFTB HFTC HFTD | Human Fetal Dura Mater | Uni-ZAP XR | LP03 |
| HRDA HRDB HRDC HRDD | Human Rhabdomyosarcoma | Uni-ZAP XR | LP03 |
| HRDE HRDF | | | |
| HCAA HCAB HCAC | Cem cells cyclohexamide treated | Uni-ZAP XR | LP03 |
| HRGA HRGB HRGC HRGD | Raji Cells, cyclohexamide | Uni-ZAP XR | LP03 |
| | treated | | |
| HSUA HSUB HSUC HSUM | Supt Cells, cyclohexamide | Uni-ZAP XR | LP03 |
| | treated | | |
| HT4A HT4C HT4D | Activated T-Cells, 12 hrs. | Uni-ZAP XR | LP03 |
| HE9A HE9B HE9C HE9D | Nine Week Old Early Stage | Uni-ZAP XR | LP03 |
| HE9E HE9F HE9G HE9H | Human | | |
| HE9M HE9N | | | |
| HATA HATB HATC HATD | Human Adrenal Gland Tumor | Uni-ZAP XR | LP03 |
| HATE | | | |
| HT5A | Activated T-Cells, 24 hrs. | Uni-ZAP XR | LP03 |
| HFGA HFGM | Human Fetal Brain | Uni-ZAP XR | LP03 |
| HNEA HNEB HNEC HNED | Human Neutrophil | Uni-ZAP XR | LP03 |
| HNEE | | | |
| HBGB HBGD | Human Primary Breast Cancer | Uni-ZAP XR | LP03 |
| HBNA HBNB | Human Normal Breast | Uni-ZAP XR | LP03 |
| HCAS | Cem Cells, cyclohexamide | Uni-ZAP XR | LP03 |
| | treated, subtra | | |
| HHPS | Human Hippocampus, | pBS | LP03 |
| | subtracted | | |
| HKCS HKCU | Human Colon Cancer, | pBS | LP03 |
| | subtracted | | |
| HRGS | Raji cells, cyclohexamide | pBS | LP03 |
| | treated, subtracted | | |
| HSUT | Supt cells, cyclohexamide | pBS | LP03 |
| | treated, differentially expressed | | |
| HT4S | Activated T-Cells, 12 hrs, | Uni-ZAP XR | LP03 |
| | subtracted | | |
| HCDA HCDB HCDC HCDD | Human Chondrosarcoma | Uni-ZAP XR | LP03 |
| HCDE | | | |
| HOAA HOAB HOAC | Human Osteosarcoma | Uni-ZAP XR | LP03 |
| HTLA HTLB HTLC HTLD | Human adult testis, large inserts | Uni-ZAP XR | LP03 |
| HTLE HTLF | | | |
| HLMA HLMC HLMD | Breast Lymph node cDNA | Uni-ZAP XR | LP03 |
| | library | | |
| H6EA H6EB H6EC | HL-60, PMA 4H | Uni-ZAP XR | LP03 |
| HTXA HTXB HTXC HTXD | Activated T-Cell | Uni-ZAP XR | LP03 |
| HTXE HTXF HTXG HTXH | (12 hs)/Thiouridine labelledEco | | |
| HNFA HNFB HNFC HNFD | Human Neutrophil, Activated | Uni-ZAP XR | LP03 |
| HNFE HNFF HNFG HNFH | | | |
| HNFJ | | | |
| HTOB HTOC | HUMAN TONSILS, | Uni-ZAP XR | LP03 |
| | FRACTION 2 | | |
| HMGB | Human OB MG63 control | Uni-ZAP XR | LP03 |
| | fraction I | | |
| HOPB | Human OB HOS control fraction I | Uni-ZAP XR | LP03 |
| HORB | Human OB HOS treated (10 nM | Uni-ZAP XR | LP03 |
| | E2) fraction I | | |
| HSVA HSVB HSVC | Human Chronic Synovitis | Uni-ZAP XR | LP03 |
| HROA | HUMAN STOMACH | Uni-ZAP XR | LP03 |
| HBJA HBJB HBJC HBJD HBJE | HUMAN B CELL | Uni-ZAP XR | LP03 |
| HBJF HBJG HBJH HBJI HBJJ | LYMPHOMA | | |
| HBJK | | | |
| HCRA HCRB HCRC | human corpus colosum | Uni-ZAP XR | LP03 |
| HODA HODB HODC HODD | human ovarian cancer | Uni-ZAP XR | LP03 |
| HDSA | Dermatofibrosarcoma | Uni-ZAP XR | LP03 |
| | Protuberance | | |
| HMWA HMWB HMWC | Bone Marrow Cell Line | Uni-ZAP XR | LP03 |
| HMWD HMWE HMWF | (RS4; 11) | | |
| HMWG HMWH HMWI HMWJ | | | |
| HSOA | stomach cancer (human) | Uni-ZAP XR | LP03 |
| HERA | SKIN | Uni-ZAP XR | LP03 |
| HMDA | Brain-medulloblastoma | Uni-ZAP XR | LP03 |
| HGLA HGLB HGLD | Glioblastoma | Uni-ZAP XR | LP03 |
| HEAA | H. Atrophic Endometrium | Uni-ZAP XR | LP03 |
| HBCA HBCB | H. Lymph node breast Cancer | Uni-ZAP XR | LP03 |
| HPWT | Human Prostate BPH, re- | Uni-ZAP XR | LP03 |
| | excision | | |
| HFVG HFVH HFVI | Fetal Liver, subtraction II | pBS | LP03 |
| HNFI | Human Neutrophils, Activated, | pBS | LP03 |
| | re-excision | | |
| HBMB HBMC HBMD | Human Bone Marrow, re- | pBS | LP03 |
| | excision | | |
| HKML HKMM HKMN | H. Kidney Medulla, re-excision | pBS | LP03 |
| HKIX HKIY | H. Kidney Cortex, subtracted | pBS | LP03 |
| HADT | H. Amygdala Depression, | pBS | LP03 |
| | subtracted | | |
| H6AS | Hl-60, untreated, subtracted | Uni-ZAP XR | LP03 |
| H6ES | HL-60, PMA 4H, subtracted | Uni-ZAP XR | LP03 |
| H6BS | HL-60, RA 4 h, Subtracted | Uni-ZAP XR | LP03 |
| H6CS | HL-60, PMA 1 d, subtracted | Uni-ZAP XR | LP03 |
| HTXJ HTXK | Activated T- | Uni-ZAP XR | LP03 |
| | cell(12 h)/Thiouridine-re- | | |
| | excision | | |
| HMSA HMSB HMSC HMSD | Monocyte activated | Uni-ZAP XR | LP03 |
| HMSE HMSF HMSG HMSH | | | |
| HMSI HMSJ HMSK | | | |
| HAGA HAGB HAGC HAGD | Human Amygdala | Uni-ZAP XR | LP03 |
| HAGE HAGF | | | |
| HSRA HSRB HSRE | STROMAL - | Uni-ZAP XR | LP03 |
| | OSTEOCLASTOMA | | |
| HSRD HSRF HSRG HSRH | Human Osteoclastoma Stromal | Uni-ZAP XR | LP03 |
| | Cells - unamplified | | |
| HSQA HSQB HSQC HSQD | Stromal cell TF274 | Uni-ZAP XR | LP03 |
| HSQE HSQF HSQG | | | |
| HSKA HSKB HSKC HSKD | Smooth muscle, serum treated | Uni-ZAP XR | LP03 |
| HSKE HSKF HSKZ | | | |
| HSLA HSLB HSLC HSLD | Smooth muscle, control | Uni-ZAP XR | LP03 |
| HSLE HSLF HSLG | | | |
| HSDA HSDD HSDE HSDF | Spinal cord | Uni-ZAP XR | LP03 |
| HSDG HSDH | | | |
| HPWS | Prostate-BPH subtracted II | pBS | LP03 |
| HSKW HSKX HSKY | Smooth Muscle-HASTE | pBS | LP03 |
| | normalized | | |
| HFPB HFPC HFPD | H. Frontal cortex, epileptic; re- | Uni-ZAP XR | LP03 |
| | excision | | |
| HSDI HSDJ HSDK | Spinal Cord, re-excision | Uni-ZAP XR | LP03 |
| HSKN HSKO | Smooth Muscle Serum Treated, | pBS | LP03 |
| | Norm | | |
| HSKG HSKH HSKI | Smooth muscle, serum | pBS | LP03 |
| | induced, re-exc | | |
| HFCA HFCB HFCC HFCD | Human Fetal Brain | Uni-ZAP XR | LP04 |
| HFCE HFCF | | | |
| HPTA HPTB HPTD | Human Pituitary | Uni-ZAP XR | LP04 |
| HTHB HTHC HTHD | Human Thymus | Uni-ZAP XR | LP04 |
| HE6B HE6C HE6D HE6E HE6F | Human Whole Six Week Old | Uni-ZAP XR | LP04 |
| HE6G HE6S | Embryo | | |
| HSSA HSSB HSSC HSSD | Human Synovial Sarcoma | Uni-ZAP XR | LP04 |
| HSSE HSSF HSSG HSSH HSSI | | | |
| HSSJ HSSK | | | |
| HE7T | 7 Week Old Early Stage Human, | Uni-ZAP XR | LP04 |
| | subtracted | | |
| HEPA HEPB HEPC | Human Epididymus | Uni-ZAP XR | LP04 |
| HSNA HSNB HSNC HSNM | Human Synovium | Uni-ZAP XR | LP04 |
| HSNN | | | |
| HPFB HPFC HPFD HPFE | Human Prostate Cancer, Stage C | Uni-ZAP XR | LP04 |
| | fraction | | |
| HE2A HE2D HE2E HE2H HE2I | 12 Week Old Early Stage | Uni-ZAP XR | LP04 |
| HE2M HE2N HE2O | Human | | |
| HE2B HE2C HE2F HE2G HE2P | 12 Week Old Early Stage | Uni-ZAP XR | LP04 |
| HE2Q | Human, II | | |
| HPTS HPTT HPTU | Human Pituitary, subtracted | Uni-ZAP XR | LP04 |
| HAUA HAUB HAUC | Amniotic Cells - TNF induced | Uni-ZAP XR | LP04 |
| HAQA HAQB HAQC HAQD | Amniotic Cells - Primary | Uni-ZAP XR | LP04 |
| | Culture | | |
| HWTA HWTB HWTC | wilm's tumor | Uni-ZAP XR | LP04 |
| HBSD | Bone Cancer, re-excision | Uni-ZAP XR | LP04 |
| HSGB | Salivary gland, re-excision | Uni-ZAP XR | LP04 |
| HSJA HSJB HSJC | Smooth muscle-ILb induced | Uni-ZAP XR | LP04 |
| HSXA HSXB HSXC HSXD | Human Substantia Nigra | Uni-ZAP XR | LP04 |
| HSHA HSHB HSHC | Smooth muscle, IL1b induced | Uni-ZAP XR | LP04 |
| HOUA HOUB HOUC HOUD | Adipocytes | Uni-ZAP XR | LP04 |
| HOUE | | | |
| HPWA HPWB HPWC HPWD | Prostate BPH | Uni-ZAP XR | LP04 |
| HPWE | | | |
| HELA HELB HELC HELD | Endothelial cells-control | Uni-ZAP XR | LP04 |
| HELE HELF HELG HELH | | | |
| HEMA HEMB HEMC HEMD | Endothelial-induced | Uni-ZAP XR | LP04 |
| HEME HEMF HEMG HEMH | | | |
| HBIA HBIB HBIC | Human Brain, Striatum | Uni-ZAP XR | LP04 |
| HHSA HHSB HHSC HHSD | Human | Uni-ZAP XR | LP04 |
| HHSE | Hypothalmus, Schizopbrenia | | |
| HNGA HNGB HNGC HNGD | neutrophils control | Uni-ZAP XR | LP04 |
| HNGE HNGF HNGG HNGH | | | |
| HNGI HNGJ | | | |
| HNHA HNHB HNHC HNHD | Neutrophils IL-1 and LPS | Uni-ZAP XR | LP04 |
| HNHE HNHF HNHG HNHH | induced | | |
| HNHI HNHJ | | | |
| HSDB HSDC | STRIATUM DEPRESSION | Uni-ZAP XR | LP04 |
| HHPT | Hypothalamus | Uni-ZAP XR | LP04 |
| HSAT HSAU HSAV HSAW | Anergic T-cell | Uni-ZAP KR | LP04 |
| HSAX HSAY HSAZ | | | |
| HBMS HBMT HBMU HBMV | Bone marrow | Uni-ZAP XR | LP04 |
| HBMW HBMX | | | |
| HOEA HOEB HOEC HOED | Osteoblasts | Uni-ZAP XR | LP04 |
| HOEE HOEF HOEJ | | | |
| HAIA HAIB HAIC HAID HAIE | Epithelial-TNFa and INF | Uni-ZAP XR | LP04 |
| HAIF | induced | | |
| HTGA HTGB HTGC HTGD | Apoptotic T-cell | Uni-ZAP XR | LP04 |
| HMCA HMCB HMCC HMCD | Macrophage-oxLDL | Uni-ZAP XR | LP04 |
| HMCE | | | |
| HMAA HMAB HMAC HMAD | Macrophage (GM-CSF treated) | Uni-ZAP XR | LP04 |
| HMAE HMAF HMAG | | | |
| HPHA | Normal Prostate | Uni-ZAP XR | LP04 |
| HPIA HPIB HPIC | LNCAP prostate cell line | Uni-ZAP XR | LP04 |
| HPJA HPJB HPJC | PC3 Prostate cell Line | Uni-ZAP XR | LP04 |
| HOSE HOSF HOSG | Human Osteoclastoma, re- | Uni-ZAP XR | LP04 |
| | excision | | |
| HTGE HTGF | Apoptotic T-cell, re-excision | Uni-ZAP XR | LP04 |
| HMAJ HMAK | H Macrophage (GM-CSF | Uni-ZAP XR | LP04 |
| | treated), re-excision | | |
| HACB HACC HACD | Human Adipose Tissue, re- | Uni-ZAP XR | LP04 |
| | excision | | |
| HFPA | H. Frontal Cortex, Epileptic | Uni-ZAP XR | LP04 |
| HFAA HFAB HFAC HFAD | Alzheimer's, spongy change | Uni-ZAP XR | LP04 |
| HFAE | | | |
| HFAM | Frontal Lobe, Dementia | Uni-ZAP XR | LP04 |
| HMIA HMIB HMIC | Human Manic Depression | Uni-ZAP XR | LP04 |
| | Tissue | | |
| HTSA HTSE HTSF HTSG | Human Thymus | pBS | LP05 |
| HTSH | | | |
| HPBA HPBB HPBC HPBD | Human Pineal Gland | pBS | LP05 |
| HPBE | | | |
| HSAA HSAB HSAC | HSA 172 Cells | pBS | LP05 |
| HSBA HSBB HSBC HSBM | HSC172 cells | pBS | LP05 |
| HJAA HJAB HJAC HJAD | Jurkat T-cell G1 phase | pBS | LP05 |
| HJBA HJBB HJBC HJBD | Jurkat T-Cell, S phase | pBS | LP05 |
| HAFA HAFB | Aorta endothelial cells + TNF-a | pBS | LP05 |
| HAWA HAWB HAWC | Human White Adipose | pBS | LP05 |
| HTNA HTNB | Human Thyroid | pBS | LP05 |
| HONA | Normal Ovary, Premenopausal | pBS | LP05 |
| HARA HARB | Human Adult Retina | pBS | LP05 |
| HLJA HLJB | Human Lung | pCMVSport 1 | LP06 |
| HOFM HOFN HOFO | H. Ovarian Tumor, II, OV5232 | pCMVSport 2.0 | LP07 |
| HOGA HOGB HOGC | OV 10-3-95 | pCMVSport 2.0 | LP07 |
| HCGL | CD34+ cells, II | pCMVSport 2.0 | LP07 |
| HDLA | Hodgkin's Lymphoma I | pCMVSport 2.0 | LP07 |
| HDTA HDTB HDTC HDTD | Hodgkin's Lymphoma II | pCMVSport 2.0 | LP07 |
| HDTE | | | |
| HKAA HKAB HKAC HKAD | Keratinocyte | pCMVSport2.0 | LP07 |
| HKAE HKAF HKAG HKAH | | | |
| HCIM | CAPFINDER, Crohn's Disease, | pCMVSport 2.0 | LP07 |
| | lib 2 | | |
| HKAL | Keratinocyte, lib 2 | pCMVSport2.0 | LP07 |
| HKAT | Keratinocyte, lib 3 | pCMVSport2.0 | LP07 |
| HNDA | Nasal polyps | pCMVSport2.0 | LP07 |
| HDRA | H. Primary Dendritic Cells, lib 3 | pCMVSport2.0 | LP07 |
| HOHA HOHB HOHC | Human Osteoblasts II | pCMVSport2.0 | LP07 |
| HLDA HLDB HLDC | Liver, Hepatoma | pCMVSport3.0 | LP08 |
| HLDN HLDO HLDP | Human Liver, normal | pCMVSport3.0 | LP08 |
| HMTA | pBMC stimulated w/poly I/C | pCMVSport3.0 | LP08 |
| HNTA | NTERA2, control | pCMVSport3.0 | LP08 |
| HDPA HDPB HDPC HDPD | Primary Dendritic Cells, lib 1 | pCMVSport3.0 | LP08 |
| HDPF HDPG HDPH HDPI | | | |
| HDPJ HDPK | | | |
| HDPM HDPN HDPO HDPP | Primary Dendritic cells, frac 2 | pCMVSport3.0 | LP08 |
| HMUA HMUB HMUC | Myoloid Progenitor Cell Line | pCMVSport3.0 | LP08 |
| HHEA HHEB HHEC HHED | T Cell helper I | pCMVSport3.0 | LP08 |
| HHEM HHEN HHEO HHEP | T cell helper II | pCMVSport3.0 | LP08 |
| HEQA HEQB HEQC | Human endometrial stromal cells | pCMVSport3.0 | LP08 |
| HJMA HJMB | Human endometrial stromal | pCMVSport3.0 | LP08 |
| | cells-treated with progesterone | | |
| HSWA HSWB HSWC | Human endometrial stromal | pCMVSport3.0 | LP08 |
| | cells-treated with estradiol | | |
| HSYA HSYB HSYC | Human Thymus Stromal Cells | pCMVSport3.0 | LP08 |
| HLWA HLWB HLWC | Human Placenta | pCMVSport3.0 | LP08 |
| HRAA HRAB HRAC | Rejected Kidney, lib 4 | pCMVSport3.0 | LP08 |
| HMTM | PCR, pBMC I/C treated | PCRII | LP09 |
| HMJA | H. Meniingima, M6 | pSport 1 | LP10 |
| HMKA HMKB HMKC HMKD | H. Meningima, M1 | pSport 1 | LP10 |
| HMKE | | | |
| HUSG HUSI | Human umbilical vein | pSport 1 | LP10 |
| | endothelial cells, IL-4 induced | | |
| HUSX HUSY | Human Umbilical Vein | pSport 1 | LP10 |
| | Endothelial Cells, uninduced | | |
| HOFA | Ovarian Tumor I, OV5232 | pSport 1 | LP10 |
| HCFA HCFB HCFC HCFD | T-Cell PHA 16 hrs | pSport 1 | LP10 |
| HCFL HCFM HCFN HCFO | T-Cell PHA 24 hrs | pSport 1 | LP10 |
| HADA HADC HADD HADE | Human Adipose | pSport 1 | LP10 |
| HADF HADG | | | |
| HOVA HOVB HOVC | Human Ovary | pSport 1 | LP10 |
| HTWB HTWC HTWD HTWE | Resting T-Cell Library, II | pSport 1 | LP10 |
| HTWF | | | |
| HMMA | Spleen metastic melanoma | pSport 1 | LP10 |
| HLYA HLYB HLYC HLYD | Spleen, Chronic lymphocytic | pSport 1 | LP10 |
| HLYE | leukemia | | |
| HCGA | CD34+ cell, I | pSport 1 | LP10 |
| HEOM HEON | Human Eosinophils | pSport 1 | LP10 |
| HTDA | Human Tonsil, Lib 3 | pSport 1 | LP10 |
| HSPA | Salivary Gland, Lib 2 | pSport 1 | LP10 |
| HCHA HCHB HCHC | Breast Cancer cell line, MDA 36 | pSport 1 | LP10 |
| HCHM HCHN | Breast Cancer Cell line, | pSport 1 | LP10 |
| | angiogenic | | |
| HCIA | Crohn's Disease | pSport 1 | LP10 |
| HDAA HDAB HDAC | HEL cell line | pSport 1 | LP10 |
| HABA | Human Astrocyte | pSport 1 | LP10 |
| HUFA HUFB HUFC | Ulcerative Colitis | pSport 1 | LP10 |
| HNTM | NTERA2 + retinoic acid, 14 | pSport 1 | LP10 |
| | days | | |
| HDQA | Primary Dendritic | pSport 1 | LP10 |
| | cells, CapFinder2, frac 1 | | |
| HDQM | Primary Dendritic Cells, | pSport 1 | LP10 |
| | CapFinder, frac 2 | | |
| HLDX | Human Liver, normal, CapFinder | pSport 1 | LP10 |
| HULA HULB HULC | Human Dermal Endothelial | pSport1 | LP10 |
| | Cells, untreated | | |
| HUMA | Human Dermal Endothelial | pSport1 | LP10 |
| | cells, treated | | |
| HCJA | Human Stromal Endometrial | pSport1 | LP10 |
| | fibroblasts, untreated | | |
| HCJM | Human Stromal endometrial | pSport1 | LP10 |
| | fibroblasts, treated w/estradiol | | |
| HEDA | Human Stromal endometrial | pSport1 | LP10 |
| | fibroblasts, treated with | | |
| | progesterone | | |
| HFNA | Human ovary tumor cell | pSport1 | LP10 |
| | OV350721 | | |
| HKGA HKGB HKGC HKGD | Merkel Cells | pSport1 | LP10 |
| HISA HISB HISC | Pancreas Islet Cell Tumor | pSport1 | LP10 |
| HLSA | Skin, burned | pSport1 | LP10 |
| HBZA | Prostate, BPH, Lib 2 | pSport1 | LP10 |
| HBZS | Prostate BPH, Lib 2, subtracted | pSport 1 | LP10 |
| HFIA HFIB HFIC | Synovial Fibroblasts (control) | pSport 1 | LP10 |
| HFIH HFII HFIJ | Synovial hypoxia | pSport 1 | LP10 |
| HFIT HFIU HFIV | Synovial IL-1/TNF stimulated | pSport 1 | LP10 |
| HGCA | Messangial cell, frac 1 | pSport1 | LP10 |
| HMVA HMVB HMVC | Bone Marrow Stromal Cell, | pSport1 | LP10 |
| | untreated | | |
| HFIX HFIY HFIZ | Synovial Fibroblasts (II1/TNF), | pSport1 | LP10 |
| | subt | | |
| HFOX HFOY HFOZ | Synovial hypoxia-RSF | pSport1 | LP10 |
| | subtracted | | |
| HMQA HMQB HMQC HMQD | Human Activated Monocytes | Uni-ZAP XR | LP11 |
| HLIA HLIB HLIC | Human Liver | pCMVSport 1 | LP012 |
| HHBA HBBB HHBC HHBD | Human Heart | pCMVSport 1 | LP012 |
| HHBE | | | |
| HBBA HBBB | Human Brain | pCMVSport 1 | LP012 |
| HLJA HLJB HLJC HLJD HLJE | Human Lung | pCMVSport 1 | LP012 |
| HOGA HOGB HOGC | Ovarian Tumor | pCMVSport 2.0 | LP012 |
| HTJM | Human Tonsils, Lib 2 | pCMVSport 2.0 | LP012 |
| HAMF HAMG | KMH2 | pCMVSport 3.0 | LP012 |
| HAJA HAJB HAJC | L428 | pCMVSport 3.0 | LP012 |
| HWBA HWBB HWBC HWBD | Dendritic cells, pooled | pCMVSport 3.0 | LP012 |
| HWBE | | | |
| HWAA HWAB HWAC HWAD | Human Bone Marrow, treated | pCMVSport 3.0 | LP012 |
| HWAE | | | |
| HYAA HYAB HYAC | B Cell lymphoma | pCMVSport 3.0 | LP012 |
| HWHG HWHH HWHI | Healing groin wound, 6.5 hours | pCMVSport 3.0 | LP012 |
| | post incision | | |
| HWHP HWHQ HWHR | Healing groin wound; 7.5 hours | pCMVSport 3.0 | LP012 |
| | post incision | | |
| HARM | Healing groin wound - zero hr | pCMVSport 3.0 | LP012 |
| | post-incision (control) | | |
| HBIM | Olfactory epithelium; | pCMVSport 3.0 | LP012 |
| | nasalcavity | | |
| HWDA | Healing Abdomen wound; | pCMVSport 3.0 | LP012 |
| | 70&90 min post incision | | |
| HWEA | Healing Abdomen Wound; 15 | pCMVSport 3.0 | LP012 |
| | days post incision | | |
| HWJA | Healing Abdomen | pCMVSport 3.0 | LP012 |
| | Wound; 21&29 days | | |
| HNAL | Human Tongue, frac 2 | pSport1 | LP012 |
| HMJA | H. Meniingima, M6 | pSport1 | LP012 |
| HMKA HMKB HMKC HMKD | H. Meningima, M1 | pSport1 | LP012 |
| HMKE | | | |
| HOFA | Ovarian Tumor I, OV5232 | pSport1 | LP012 |
| HCFA HCFB HCFC HCFD | T-Cell PHA 16 hrs | pSport1 | LP012 |
| HCFL HCFM HCFN HCFO | T-Cell PHA 24 hrs | pSport1 | LP012 |
| HMMA HMMB HMMC | Spleen metastic melanoma | pSport1 | LP012 |
| HTDA | Human Tonsil, Lib 3 | pSport1 | LP012 |
| HDBA | Human Fetal Thymus | pSport1 | LP012 |
| HDUA | Pericardium | pSport1 | LP012 |
| HBZA | Prostate, BPH, Lib 2 | pSport1 | LP012 |
| HWCA | Larynx tumor | pSport1 | LP012 |
| HWKA | Normal lung | pSport1 | LP012 |
| HSMB | Bone marrow stroma, treated | pSport1 | LP012 |
| HBHM | Normal trachea | pSport1 | LP012 |
| HLFC | Human Larynx | pSport1 | LP012 |
| HLRB | Siebben Polyposis | pSport1 | LP012 |
| HNIA | Mammary Gland | pSport1 | LP012 |
| HNJB | Palate carcinoma | pSport1 | LP012 |
| HNKA | Palate normal | pSport1 | LP012 |
| HMZA | Pharynx carcinoma | pSport1 | LP012 |
| HABG | Cheek Carcinoma | pSport1 | LP012 |
| HMZM | Pharynx Carcinoma | pSport1 | LP012 |
| HDRM | Larynx Carcinoma | pSport1 | LP012 |
| HVAA | Pancreas normal PCA4 No | pSport1 | LP012 |
| HICA | Tongue carcinoma | pSport1 | LP012 |
| HUKA HUKB HUKC HUKD | Human Uterine Cancer | Lambda ZAP II | LP013 |
| HUKE | | | |
| HFFA | Human Fetal Brain, random | Lambda ZAP II | LP013 |
| | primed | | |
| HTUA | Activated T-cell labeled with 4- | Lambda ZAP II | LP013 |
| | thioluri | | |
| HBQA | Early Stage Human Brain, | Lambda ZAP II | LP013 |
| | random primed | | |
| HMEB | Human microvascular | Lambda ZAP II | LP013 |
| | Endothelial cells, fract. B | | |
| HUSH | Human Umbilical Vein | Lambda ZAP II | LP013 |
| | Endothelial cells, fract. A, re- | | |
| | excision | | |
| HLQC HLQD | Hepatocellular tumor, re- | Lambda ZAP II | LP013 |
| | excision | | |
| HTWJ HTWK HTWL | Resting T-cell, re-excision | Lambda ZAP II | LP013 |
| HF6S | Human Whole 6 week Old | pBluescript | LP013 |
| | Embryo (II), subt | | |
| HHPS | Human Hippocampus, | pBluescript | LP013 |
| | subtracted | | |
| HL1S | LNCAP, differential expression | pBluescript | LP013 |
| HLHS HLHT | Early Stage Human Lung, | pBluescript | LP013 |
| | Subtracted | | |
| HSUS | Supt cells, cyclohexamide | pBluescript | LP013 |
| | treated, subtracted | | |
| HSUT | Supt cells, cyclohexamide | pBluescript | LP013 |
| | treated, differentially expressed | | |
| HSDS | H. Striatum Depression, | pBluescript | LP013 |
| | subtracted | | |
| HPTZ | Human Pituitary, Subtracted VII | pBluescript | LP013 |
| HSDX | H. Striatum Depression, subt II | pBluescript | LP013 |
| HSDZ | H. Striatum Depression, subt | pBluescript | LP013 |
| HPBA HPBB HPBC HPBD | Human Pineal Gland | pBluescript SK- | LP013 |
| HPBE | | | |
| HRTA | Colorectal Tumor | pBluescript SK- | LP013 |
| HSBA HSBB HSBC HSBM | HSC172 cells | pBluescript SK- | LP013 |
| HJAA HJAB HJAC HJAD | Jurkat T-cell G1 phase | pBluescript SK- | LP013 |
| HJBA HJBB HJBC HJBD | Jurkat T-cell, S1 phase | pBluescript SK- | LP013 |
| HTNA HTNB | Human Thyroid | pBluescript SK- | LP013 |
| HAHA HAHB | Human Adult Heart | Uni-ZAP XR | LP013 |
| HE6A | Whole 6 week Old Embryo | Uni-ZAP XR | LP013 |
| HFCA HFCB HFCC HFCD | Human Fetal Brain | Uni-ZAP XR | LP013 |
| HFCE | | | |
| HFKC HFKD HFKE HFKF | Human Fetal Kidney | Uni-ZAP XR | LP013 |
| HFKG | | | |
| HGBA HGBD HGBE HGBF | Human Gall Bladder | Uni-ZAP XR | LP013 |
| HGBG | | | |
| HPRA HPRB HPRC HPRD | Human Prostate | Uni-ZAP XR | LP013 |
| HTEA HTEB HTEC HTED | Human Testes | Uni-ZAP XR | LP013 |
| HTEE | | | |
| HTTA HTTB HTTC HTTD | Human Testes Tumor | Uni-ZAP XR | LP013 |
| HTTE | | | |
| HYBA HYBB | Human Fetal Bone | Uni-ZAP XR | LP013 |
| HFLA | Human Fetal Liver | Uni-ZAP XR | LP013 |
| HHFB HHFC HHFD HHFE | Human Fetal Heart | Uni-ZAP XR | LP013 |
| HHFF | | | |
| HUVB HUVC HUVD HUVE | Human Umbilical Vein, End. | Uni-ZAP XR | LP013 |
| | remake | | |
| HTHB HTHC HTHD | Human Thymus | Uni-ZAP XR | LP013 |
| HSTA HSTB HSTC HSTD | Human Skin Tumor | Uni-ZAP XR | LP013 |
| HTAA HTAB HTAC HTAD | Human Activated T-cells | Uni-ZAP XR | LP013 |
| HTAE | | | |
| HFEA HFEB HFEC | Human Fetal Epithelium (skin) | Uni-ZAP XR | LP013 |
| HJPA HJPB HJPC HJPD | Human Jurkat Membrane Bound | Uni-ZAP XR | LP013 |
| | Polysomes | | |
| HESA | Human Epithelioid Sarcoma | Uni-ZAP XR | LP013 |
| HALS | Human Adult Liver, Subtracted | Uni-ZAP XR | LP013 |
| HFTA HFTB HFTC HFTD | Human Fetal Dura Mater | Uni-ZAP XR | LP013 |
| HCAA HCAB HCAC | Cem cells, cyclohexamide | Uni-ZAP XR | LP013 |
| | treated | | |
| HRGA HRGB HRGC HRGD | Raji Cells, cyclohexamide | Uni-ZAP XR | LP013 |
| | treated | | |
| HE9A HE9B HE9C HE9D | Nine Week Old Early Stage | Uni-ZAP XR | LP013 |
| HE9E | Human | | |
| HSFA | Human Fibrosarcoma | Uni-ZAP XR | LP013 |
| HATA HATB HATC HATD | Human Adrenal Gland Tumor | Uni-ZAP XR | LP013 |
| HATE | | | |
| HTRA | Human Trachea Tumor | Uni-ZAP XR | LP013 |
| HE2A HE2D HE2E HB2H HE2I | 12 Week Old Early Stage | Uni-ZAP XR | LP013 |
| | Human | | |
| HE2B HE2C HE2F HE2G HE2P | 12 Week Old Early Stage | Uni-ZAP XR | LP013 |
| | Human, II | | |
| HNEA HNEB HNEC HNED | Human Neutrophil | Uni-ZAP XR | LP013 |
| HNEE | | | |
| HBGA | Human Primary Breast Cancer | Uni-ZAP XR | LP013 |
| HPTS HPTT HPTU | Human Pituitary, subtracted | Uni-ZAP XR | LP013 |
| HMQA HMQB EMQC HMQD | Human Activated Monocytes | Uni-ZAP XR | LP013 |
| HOAA HOAB HOAC | Human Osteosarcoma | Uni-ZAP XR | LP013 |
| HTOA HTOD HTOE HTOF | human tonsils | Uni-ZAP XR | LP013 |
| HTOG | | | |
| HMGB | Human OB MG63 control | Uni-ZAP XR | LP013 |
| | fraction I | | |
| HOPB | Human OB HOS control fraction I | Uni-ZAP XR | LP013 |
| HOQB | Human OB HOS treated (1 nM | Uni-ZAP XR | LP013 |
| | E2) fraction I | | |
| HAUA HAUB HAUC | Amniotic Cells - TNF induced | Uni-ZAP XR | LP013 |
| HAQA HAQB HAQC HAQD | Amniotic Cells - Primary | Uni-ZAP XR | LP013 |
| | Culture | | |
| HROA HROC | HUMAN STOMACH | Uni-ZAP XR | LP013 |
| HBJA HBJB HBJC HBJD HBJE | HUMAN B CELL | Uni-ZAP XR | LP013 |
| | LYMPHOMA | | |
| HODA HODB HODC HODD | human ovarian cancer | Uni-ZAP XR | LP013 |
| HCPA | Corpus Callosum | Uni-ZAP XR | LP013 |
| HSOA | stomach cancer (human) | Uni-ZAP XR | LP013 |
| HERA | SKIN | Uni-ZAP XR | LP013 |
| HMDA | Brain-medulloblastoma | Uni-ZAP XR | LP013 |
| HGLA HGLB HGLD | Glioblastoma | Uni-ZAP XR | LP013 |
| HWTA HWTB HWTC | wilm's tumor | Uni-ZAP XR | LP013 |
| HEAA | H. Atrophic Endometrium | Uni-ZAP XR | LP013 |
| HAPN HAPO HAPP HAPQ | Human Adult Pulmonary; re- | Uni-ZAP XR | LP013 |
| HAPR | excision | | |
| HLTG HLTH | Human T-cell lymphoma; re- | Uni-ZAP XR | LP013 |
| | excision | | |
| HAHC HAHD HAHE | Human Adult Heart; re-excision | Uni-ZAP XR | LP013 |
| HAGA HAGB HAGC HAGD | Human Amygdala | Uni-ZAP XR | LP013 |
| HAGE | | | |
| HSJA HSJB HSJC | Smooth muscle-ILb induced | Uni-ZAP XR | LP013 |
| HSHA HSHB HSHC | Smooth muscle, IL1b induced | Uni-ZAP XR | LP013 |
| HPWA HPWB HPWC HPWD | Prostate BPH | Uni-ZAP XR | LP013 |
| HPWE | | | |
| HPIA HPIB HPIC | LNCAP prostate cell line | Uni-ZAP XR | LP013 |
| HPJA HPJB HPJC | PC3 Prostate cell line | Uni-ZAP XR | LP013 |
| HBTA | Bone Marrow Stroma, | Uni-ZAP XR | LP013 |
| | TNF&LPS ind | | |
| HMCF HMCG HMCH HMCI | Macrophage-oxLDL; re-excision | Uni-ZAP XR | LP013 |
| HMCJ | | | |
| HAGG HAGH HAGI | Human Amygdala; re-excision | Uni-ZAP XR | LP013 |
| HACA | H. Adipose Tissue | Uni-ZAP XR | LP013 |
| HKFB | K562 + PMA (36 hrs), re- | ZAP Express | LP013 |
| | excision | | |
| HCWT HCWU HCWV | CD34 positive cells (cord | ZAP Express | LP013 |
| | blood), re-ex | | |
| HBWA | Whole brain | ZAP Express | LP013 |
| HBXA HBXB HBXC HBXD | Human Whole Brain #2 - Oligo | ZAP Express | LP013 |
| | dT >1.5 Kb | | |
| HAVM | Temporal cortex-Alzheizmer | pT-Adv | LP014 |
| HAVT | Hippocampus, Alzheimer | pT-Adv | LP014 |
| | Subtracted | | |
| HHAS | CHME Cell Line | Uni-ZAP XR | LP014 |
| HAJR | Larynx normal | pSport 1 | LP014 |
| HWLE HWLF HWLG HWLH | Colon Normal | pSport 1 | LP014 |
| HCRM HCRN HCRO | Colon Carcinoma | pSport 1 | LP014 |
| HWLI HWLJ HWLK | Colon Normal | pSport 1 | LP014 |
| HWLQ HWLR HWLS HWLT | Colon Tumor | pSport 1 | LP014 |
| HBFM | Gastrocnemius Muscle | pSport 1 | LP014 |
| HBOD HBOE | Quadriceps Muscle | pSport 1 | LP014 |
| HBKD HBKE | Soleus Muscle | pSport 1 | LP014 |
| HCCM | Pancreatic Langerhans | pSport 1 | LP014 |
| HWGA | Larynx carcinoma | pSport 1 | LP014 |
| HWGM HWGN | Larynx carcinoma | pSport 1 | LP014 |
| HWLA HWLB HWLC | Normal colon | pSport 1 | LP014 |
| HWLM HWLN | Colon Tumor | pSport 1 | LP014 |
| HVAM HVAN HVAO | Pancreas Tumor | pSport 1 | LP014 |
| HWGQ | Larynx carcinoma | pSport 1 | LP014 |
| HAQM HAQN | Salivary Gland | pSport 1 | LP014 |
| HASM | Stomach; normal | pSport 1 | LP014 |
| HBCM | Uterus; normal | pSport 1 | LP014 |
| HCDM | Testis; normal | pSport 1 | LP014 |
| HDJM | Brain; normal | pSport 1 | LP014 |
| HEFM | Adrenal Gland, normal | pSport 1 | LP014 |
| HBAA | Rectum normal | pSport 1 | LP014 |
| HFDM | Rectum tumour | pSport 1 | LP014 |
| HGAM | Colon, normal | pSport 1 | LP014 |
| HHMM | Colon, tumour | pSport 1 | LP014 |
| HCLB HCLC | Human Lung Cancer | Lambda Zap II | LP015 |
| HRLA | L1 Cell line | ZAP Express | LP015 |
| HHAM | Hypothalamus, Alzheimer's | pCMVSport 3.0 | LP015 |
| HKBA | Ku 812F Basophils Line | pSport 1 | LP015 |
| HS2S | Saos2, Dexamethosome Treated | pSport 1 | LP016 |
| HA5A | Lung Carcinoma A549 | pSport 1 | LP016 |
| | TNFalpha activated | | |
| HTFM | TF-1 Cell Line GM-CSF Treated | pSport 1 | LP016 |
| HYAS | Thyroid Tumour | pSport 1 | LP016 |
| HUTS | Larynx Normal | pSport 1 | LP016 |
| HXOA | Larynx Tumor | pSport 1 | LP016 |
| HEAH | Ea.hy.926 cell line | pSport 1 | LP016 |
| HINA | Adenocarcinoma Human | pSport 1 | LP016 |
| HRMA | Lung Mesothelium | pSport 1 | LP016 |
| HLCL | Human Pre-Differentiated | Uni-Zap XR | LP017 |
| | Adipocytes | | |
| HS2A | Saos2 Cells | pSport 1 | LP020 |
| HS2I | Saos2 Cells; Vitamin D3 Treated | pSport 1 | LP020 |
| HUCM | CHME Cell Line, untreated | pSport 1 | LP020 |
| HEPN | Aryepiglottis Normal | pSport 1 | LP020 |
| HPSN | Sinus Piniformis Tumour | pSport 1 | LP020 |
| HNSA | Stomach Normal | pSport 1 | LP020 |
| HNSM | Stomach Tumour | pSport 1 | LP020 |
| HNLA | Liver Normal Met5No | pSport 1 | LP020 |
| HUTA | Liver Tumour Met 5 Tu | pSport 1 | LP020 |
| HOCN | Colon Normal | pSport 1 | LP020 |
| HOCT | Colon Tumor | pSport 1 | LP020 |
| HTNT | Tongue Tumour | pSport 1 | LP020 |
| HLXN | Larynx Normal | pSport 1 | LP020 |
| HLXT | Larynx Tumour | pSport 1 | LP020 |
| HTYN | Thymus | pSport 1 | LP020 |
| HPLN | Placenta | pSport 1 | LP020 |
| HTNG | Tongue Normal | pSport 1 | LP020 |
| HZAA | Thyroid Normal (SDCA2 No) | pSport 1 | LP020 |
| HWES | Thyroid Thyroiditis | pSport 1 | LP020 |
| HFHD | Ficolled Human Stromal Cells, | pTrip1Ex2 | LP021 |
| | 5Fu treated | | |
| HFHM, HFHN | Ficolled Human Stromal Cells, | pTrip1Ex2 | LP021 |
| | Untreated | | |
| HPCI | Hep G2 Cells, lambda library | lambda Zap-CMV | LP021 |
| | | XR | |
| HBCA, HBCB, HBCC | H. Lymph node breast Cancer | Uni-ZAP XR | LP021 |
| HCOK | Chondrocytes | pSPORT1 | LP022 |
| HDCA, HDCB, HDCC | Dendritic Cells From CD34 | pSPORT1 | LP022 |
| | Cells | | |
| HDMA, HDMB | CD40 activated monocyte | pSPORT1 | LP022 |
| | dendritic cells | | |
| HDDM, HDDN, HDDO | LPS activated derived dendritic | pSPORT1 | LP022 |
| | cells | | |
| HPCR | Hep G2 Cells, PCR library | lambda Zap-CMV | LP022 |
| | | XR | |
| HAAA, HAAB, HAAC | Lung, Cancer (4005313A3): | pSPORT1 | LP022 |
| | Invasive Poorly Differentiated | | |
| | Lung Adenocarcinoma | | |
| HIPA, HIPB, HIPC | Lung, Cancer (4005163 B7): | pSPORT1 | LP022 |
| | Invasive, Poorly Diff. | | |
| | Adenocarcinoma, Metastatic | | |
| HOOH, HOOI | Ovary, Cancer: (4004562 B6) | pSPORT1 | LP022 |
| | Papillary Serous Cystic | | |
| | Neoplasm, Low Malignant Pot | | |
| HIDA | Lung, Normal: (4005313 B1) | pSPORT1 | LP022 |
| HUJA, HUJB, HUJC, HUJD, HUJE | B-Cells | pCMVSport 3.0 | LP022 |
| HNOA, HNOB, HNOC, HNOD | Ovary, Normal: (9805C040R) | pSPORT1 | LP022 |
| HNLM | Lung, Normal: (4005313 B1) | pSPORT1 | LP022 |
| HSCL | Stromal Cells | pSPORT1 | LP022 |
| HAAX | Lung, Cancer: (4005313 A3) | pSPORT1 | LP022 |
| | Invasive Poorly-differentiated | | |
| | Metastatic lung adenocarcinoma | | |
| HUUA, HUUB, HUUC, HUUD | B-cells (unstimulated) | pTrip1Ex2 | LP022 |
| HWWA, HWWB, HWWC, HWWD, | B-cells (stimulated) | pSPORT1 | LP022 |
| HWWE, HWWF, HWWG | | | |
| HCCC | Colon, Cancer: (9808C064R) | pCMVSport 3.0 | LP023 |
| HPDO HPDP HPDQ HPDR | Ovary, Cancer (9809C332): | pSport 1 | LP023 |
| HPD | Poorly differentiated | | |
| | adenocarcinoma | | |
| HPCO HPCP HPCQ HPCT | Ovary, Cancer (15395A1F): | pSport 1 | LP023 |
| | Grade II Papillary Carcinoma | | |
| HOCM HOCO HOCP HOCQ | Ovary, Cancer: (15799A1F) | pSport 1 | LP023 |
| | Poorly differentiated carcinoma | | |
| HCBM HCBN HCBO | Breast, Cancer: (4004943 A5) | pSport 1 | LP023 |
| HNBT HNBU HNBV | Breast, Normal: (4005522B2) | pSport 1 | LP023 |
| HBCP HBCQ | Breast, Cancer: (4005522 A2) | pSport 1 | LP023 |
| HBCJ | Breast, Cancer: (9806C012R) | pSport 1 | LP023 |
| HSAM HSAN | Stromal cells 3.88 | pSport 1 | LP023 |
| HVCA HVCB HVCC HVCD | Ovary, Cancer: (4004332 A2) | pSport 1 | LP023 |
| HSCK HSEN HSEO | Stromal cells (HBM3.18) | pSport 1 | LP023 |
| HSCP HSCQ | stromal cell clone 2.5 | pSport 1 | LP023 |
| HUXA | Breast Cancer: (4005385 A2) | pSport 1 | LP023 |
| HCOM HCON HCOO HCOP | Ovary, Cancer (4004650 A3): | pSport 1 | LP023 |
| HCOQ | Well-Differentiated | | |
| | Micropapillary Serous | | |
| | Carcinoma | | |
| HBNM | Breast, Cancer: (9802C020E) | pSport 1 | LP023 |
| HVVA HVVB HVVC HVVD | Human Bone Marrow, treated | pSport 1 | LP023 |
| HVVE | | | |

[0733] Two nonlimiting examples are provided below for isolating a particular clone from the deposited sample of plasmid cDNAs cited for that clone in Table 7. First, a plasmid is directly isolated by screening the clones using a polynucleotide probe corresponding to the nucleotide sequence of SEQ ID NO:X.

[0734] Particularly, a specific polynucleotide with 30-40 nucleotides is synthesized using an Applied Biosystems DNA synthesizer according to the sequence reported. The oligonucleotide is labeled, for instance, with ³²P-γ-ATP using T4 polynucleotide kinase and purified according to routine methods. (E.g., Maniatis et al., Molecular Cloning: A Laboratory Manual, Cold Spring Harbor Press, Cold Spring, N.Y. (1982)). The plasmid mixture is transformed into a suitable host, as indicated above (such as XL-1 Blue (Stratagene)) using techniques known to those of skill in the art, such as those provided by the vector supplier or in related publications or patents cited above. The transformants are plated on 1.5% agar plates (containing the appropriate selection agent, e.g., ampicillin) to a density of about 150 transformants (colonies) per plate. These plates are screened using Nylon membranes according to routine methods for bacterial colony screening (e.g., Sambrook et al., Molecular Cloning: A Laboratory Manual, 2nd Edit., (1989), Cold Spring Harbor Laboratory Press, pages 1.93 to 1.104), or other techniques known to those of skill in the art.

[0735] Alternatively, two primers of 17-20 nucleotides derived from both ends of the nucleotide sequence of SEQ ID NO:X are synthesized and used to amplify the desired cDNA using the deposited cDNA plasmid as a template. The polymerase chain reaction is carried out under routine conditions, for instance, in 25 μl of reaction mixture with 0.5 ug of the above cDNA template. A convenient reaction mixture is 1.5-5 mM MgCl₂, 0.01% (w/v) gelatin, 20 μM each of DATP, dCTP, dGTP, dTTP, 25 pmol of each primer and 0.25 Unit of Taq polymerase. Thirty five cycles of PCR (denaturation at 94° C. for 1 min; annealing at 55° C. for 1 min; elongation at 72° C. for 1 min) are performed with a Perkin-Elmer Cetus automated thermal cycler. The amplified product is analyzed by agarose gel electrophoresis and the DNA band with expected molecular weight is excised and purified. The PCR product is verified to be the selected sequence by subcloning and sequencing the DNA product.

[0736] Several methods are available for the identification of the 5′ or 3′ non-coding portions of a gene which may not be present in the deposited clone. These methods include but are not limited to, filter probing, clone enrichment using specific probes, and protocols similar or identical to 5′ and 3′ “RACE” protocols which are well known in the art. For instance, a method similar to 5′ RACE is available for generating the missing 5′ end of a desired fullength transcript. (Fromont-Racine et al., Nucleic Acids Res. 21(7):1683-1684 (1993)).

[0737] Briefly, a specific RNA oligonucleotide is ligated to the 5′ ends of a population of RNA presumably containing full-length gene RNA transcripts. A primer set containing a primer specific to the ligated RNA oligonucleotide and a primer specific to a known sequence of the gene of interest is used to PCR amplify the 5′ portion of the desired full-length gene. This amplified product may then be sequenced and used to generate the full length gene.

[0738] This above method starts with total RNA isolated from the desired source, although poly-A+ RNA can be used. The RNA preparation can then be treated with phosphatase if necessary to eliminate 5′ phosphate groups on degraded or damaged RNA which may interfere with the later RNA ligase step. The phosphatase should then be inactivated and the RNA treated with tobacco acid pyrophosphatase in order to remove the cap structure present at the 5′ ends of messenger RNAs. This reaction leaves a 5′ phosphate group at the 5′ end of the cap cleaved RNA which can then be ligated to an RNA oligonucleotide using T4 RNA ligase.

[0739] This modified RNA preparation is used as a template for first strand cDNA synthesis using a gene specific oligonucleotide. The first strand synthesis reaction is used as a template for PCR amplification of the desired 5′ end using a primer specific to the ligated RNA oligonucleotide and a primer specific to the known sequence of the gene of interest. The resultant product is then sequenced and analyzed to confirm that the 5′ end sequence belongs to the desired gene.

### Example 2

### Isolation of Genomic Clones Corresponding to a Polynucleolide

[0740] A human genomic P1 library (Genomic Systems, Inc.) is screened by PCR using primers selected for the sequence corresponding to SEQ ID NO:X according to the method described in Example 1. (See also, Sambrook.)

### Example 3

### Tissue Specific Expression Analysis

[0741] The Human Genome Sciences, Inc. (HGS) database is derived from sequencing tissue and/or disease specific cDNA libraries. Libraries generated from a particular tissue are selected and the specific tissue expression pattern of EST groups or assembled contigs within these libraries is determined by comparison of the expression patterns of those groups or contigs within the entire database. ESTs and assembled contigs which show tissue specific expression are selected.

[0742] The original clone from which the specific EST sequence was generated, or in the case of an assembled contig, the clone from which the 5′ most EST sequence was generated, is obtained from the catalogued library of clones and the insert amplified by PCR using methods known in the art. The PCR product is denatured and then transferred in 96 or 384 well format to a nylon membrane (Schleicher and Scheull) generating an array filter of tissue specific clones. Housekeeping genes, maize genes, and known tissue specific genes are included on the filters. These targets can be used in signal normalization and to validate assay sensitivity. Additional targets are included to monitor probe length and specificity of hybridization.

[0743] Radioactively labeled hybridization probes are generated by first strand cDNA synthesis per the manufacturer's instructions (Life Technologies) from mRNA/RNA samples prepared from the specific tissue being analyzed (e.g., prostate, prostate cancer, ovarian, ovarian cancer, etc.). The hybridization probes are purified by gel exclusion chromatography, quantitated, and hybridized with the array filters in hybridization bottles at 65° C. overnight. The filters are washed under stringent conditions and signals are captured using a Fuji phosphorimager.

[0744] Data is extracted using AIS software and following background subtraction, signal normalization is performed. This includes a normalization of filter-wide expression levels between different experimental runs. Genes that are differentially expressed in the tissue of interest are identified.

### Example 4

### Chromosomal Mapping of the Polynucleotides

[0745] An oligonucleotide primer set is designed according to the sequence at the 5′ end of SEQ ID NO:X. This primer preferably spans about 100 nucleotides. This primer set is then used in a polymerase chain reaction under the following set of conditions: 30 seconds, 95° C.; 1 minute, 56° C; 1 minute, 70° C. This cycle is repeated 32 times followed by one 5 minute cycle at 70° C. Human, mouse, and hamster DNA is used as template in addition to a somatic cell hybrid panel containing individual chromosomes or chromosome fragments (Bios, Inc). The reactions are analyzed on either 8% polyacrylamide gels or 3.5% agarose gels. Chromosome mapping is determined by the presence of an approximately 100 bp PCR fragment in the particular somatic cell hybrid.

### Example 5

### Bacterial Expression of a Polypeptide

[0746] A polynucleotide encoding a polypeptide of the present invention is amplified using PCR oligonucleotide primers corresponding to the 5′ and 3′ ends of the DNA sequence, as outlined in Example 1, to synthesize insertion fragments. The primers used to amplify the cDNA insert should preferably contain restriction sites, such as BamHI and XbaI, at the 5′ end of the primers in order to clone the amplified product into the expression vector. For example, BamHI and XbaI correspond to the restriction enzyme sites on the bacterial expression vector pQE-9. (Qiagen, Inc., Chatsworth, Calif.). This plasmid vector encodes antibiotic resistance (Amp^{r}), a bacterial origin of replication (ori), an IPTG-regulatable promoter/operator (P/O), a ribosome binding site (RBS), a 6-histidine tag (6-His), and restriction enzyme cloning sites.

[0747] The pQE-9 vector is digested with BamHI and XbaI and the amplified fragment is ligated into the pQE-9 vector maintaining the reading frame initiated at the bacterial RBS. The ligation mixture is then used to transform the E. coli strain M15/rep4 (Qiagen, Inc.) which contains multiple copies of the plasmid pREP4, which expresses the lacI repressor and also confers kanamycin resistance (Kan^{r}). Transformants are identified by their ability to grow on LB plates and ampicillin/kanamycin resistant colonies are selected. Plasmid DNA is isolated and confirmed by restriction analysis.

[0748] Clones containing the desired constructs are grown overnight (O/N) in liquid culture in LB media supplemented with both Amp (100 ug/ml) and Kan (25 ug/ml). The O/N culture is used to inoculate a large culture at a ratio of 1:100 to 1:250. The cells are grown to an optical density 600 (O.D.⁶⁰⁰) of between 0.4 and 0.6. IPTG (Isopropyl-B-D-thiogalacto pyranoside) is then added to a final concentration of 1 mM. IPTG induces by inactivating the lacI repressor, clearing the P/O leading to increased gene expression.

[0749] Cells are grown for an extra 3 to 4 hours. Cells are then harvested by centrifugation (20 mins at 6000×g). The cell pellet is solubilized in the chaotropic agent 6 Molar Guanidine HCl by stirring for 3-4 hours at 4° C. The cell debris is removed by centrifugation, and the supernatant containing the polypeptide is loaded onto a nickel-nitrilo-tri-acetic acid (“Ni-NTA”) affinity resin column (available from QIAGEN, Inc., supra). Proteins with a 6×His tag bind to the Ni-NTA resin with high affinity and can be purified in a simple one-step procedure (for details see: The QIAexpressionist (1995) QIAGEN, Inc., supra).

[0750] Briefly, the supernatant is loaded onto the column in 6 M guanidine-HCl, pH 8. The column is first washed with 10 volumes of 6 M guanidine-HCl, pH 8, then washed with 10 volumes of 6 M guanidine-HCl pH 6, and finally the polypeptide is eluted with 6 M guanidine-HCl, pH 5.

[0751] The purified protein is then renatured by dialyzing it against phosphate-buffered saline (PBS) or 50 mM Na-acetate, pH 6 buffer plus 200 mM NaCl. Alternatively, the protein can be successfully refolded while immobilized on the Ni-NTA column. The recommended conditions are as follows: renature using a linear 6M-1M urea gradient in 500 mM NaCl, 20% glycerol, 20 mM Tris/HCl pH 7.4, containing protease inhibitors. The renaturation should be performed over a period of 1.5 hours or more. After renaturation the proteins are eluted by the addition of 250 mM immidazole. Immidazole is removed by a final dialyzing step against PBS or 50 mM sodium acetate pH 6 buffer plus 200 mM NaCl. The purified protein is stored at 4° C. or frozen at −80° C.

[0752] In addition to the above expression vector, the present invention further includes an expression vector, called pHE4a (ATCC Accession Number 209645, deposited on Feb. 25, 1998) which contains phage operator and promoter elements operatively linked to a polynucleotide of the present invention, called pHE4a. (ATCC Accession Number 209645, deposited on Feb. 25, 1998.) This vector contains: 1) a neomycinphosphotransferase gene as a selection marker, 2) an E. coli origin of replication, 3) a T5 phage promoter sequence, 4) two lac operator sequences, 5) a Shine-Delgarno sequence, and 6) the lactose operon repressor gene (lacIq). The origin of replication (oriC) is derived from pUC19 (LTI, Gaithersburg, Md.). The promoter and operator sequences are made synthetically.

[0753] DNA can be inserted into the pBE4a by restricting the vector with NdeI and XbaI, BamHI, XhoI, or Asp718, running the restricted product on a gel, and isolating the larger fragment (the stuffer fragment should be about 310 base pairs). The DNA insert is generated according to the PCR protocol described in Example 1, using PCR primers having restriction sites for NdeI (5′ primer) and XbaI, BamHI, XhoI, or Asp718 (3′ primer). The PCR insert is gel purified and restricted with compatible enzymes. The insert and vector are ligated according to standard protocols.

[0754] The engineered vector could easily be substituted in the above protocol to express protein in a bacterial system.

### Example 6

### Purification of a Polypeptide from an Inclusion Body

[0755] The following alternative method can be used to purify a polypeptide expressed in E coli when it is present in the form of inclusion bodies. Unless otherwise specified, all of the following steps are conducted at 4-10° C.

[0756] Upon completion of the production phase of the E. coli fermentation, the cell culture is cooled to 4-10° C. and the cells harvested by continuous centrifugation at 15,000 rpm (Heraeus Sepatech). On the basis of the expected yield of protein per unit weight of cell paste and the amount of purified protein required, an appropriate amount of cell paste, by weight, is suspended in a buffer solution containing 100 mM Tris, 50 mM EDTA, pH 7.4. The cells are dispersed to a homogeneous suspension using a high shear mixer.

[0757] The cells are then lysed by passing the solution through a microfluidizer (Microfuidics, Corp. or APV Gaulin, Inc.) twice at 4000-6000 psi. The homogenate is then mixed with NaCl solution to a final concentration of 0.5 M NaCl, followed by centrifugation at 7000×g for 15 min. The resultant pellet is washed again using 0.5M NaCl, 100 mM Tris, 50 mM EDTA, pH 7.4.

[0758] The resulting washed inclusion bodies are solubilized with 1.5 M guanidine hydrochloride (GuHCl) for 2-4 hours. After 7000×g centrifugation for 15 min., the pellet is discarded and the polypeptide containing supernatant is incubated at 4° C. overnight to allow further GuHCl extraction.

[0759] Following high speed centrifugation (30,000×g) to remove insoluble particles, the GuHCl solubilized protein is refolded by quickly mixing the GuHCl extract with 20 volumes of buffer containing 50 mM sodium, pH 4.5, 150 mM NaCl, 2 mM EDTA by vigorous stirring. The refolded diluted protein solution is kept at 4° C. without mixing for 12 hours prior to further purification steps.

[0760] To clarify the refolded polypeptide solution, a previously prepared tangential filtration unit equipped with 0.16 μm membrane filter with appropriate surface area (e.g., Filtron), equilibrated with 40 mM sodium acetate, pH 6.0 is employed. The filtered sample is loaded onto a cation exchange resin (e.g., Poros HS-50, Perseptive Biosystems). The column is washed with 40 mM sodium acetate, pH 6.0 and eluted with 250 mM, 500 mM, 1000 mM, and 1500 mM NaCl in the same buffer, in a stepwise manner. The absorbance at 280 nm of the effluent is continuously monitored. Fractions are collected and further analyzed by SDS-PAGE.

[0761] Fractions containing the polypeptide are then pooled and mixed with 4 volumes of water. The diluted sample is then loaded onto a previously prepared set of tandem columns of strong anion (Poros HQ-50, Perseptive Biosystems) and weak anion (Poros CM-20, Perseptive Biosystems) exchange resins. The columns are equilibrated with 40 mM sodium acetate, pH 6.0. Both columns are washed with 40 mM sodium acetate, pH 6.0, 200 mM NaCl. The CM-20 column is then eluted using a 10 column volume linear gradient ranging from 0.2 M NaCl, 50 mM sodium acetate, pH 6.0 to 1.0 M NaCl, 50 mM sodium acetate, pH 6.5. Fractions are collected under constant A₂₈₀ monitoring of the effluent. Fractions containing the polypeptide (determined, for instance, by 16% SDS-PAGE) are then pooled.

[0762] The resultant polypeptide should exhibit greater than 95% purity after the above refolding and purification steps. No major contaminant bands should be observed from Commassie blue stained 16% SDS-PAGE gel when 5 μg of purified protein is loaded. The purified protein can also be tested for endotoxin/LPS contamination, and typically the LPS content is less than 0.1 ng/ml according to LAL assays.

### Example 7

### Cloning and Expression of a Polypeptide in a Baculovirus Expression System

[0763] In this example, the plasmid shuttle vector pA2 is used to insert a polynucleotide into a baculovirus to express a polypeptide. This expression vector contains the strong polyhedrin promoter of the Autographa californica nuclear polyhedrosis virus (AcMNPV) followed by convenient restriction sites such as BamHI, Xba I and Asp718. The polyadenylation site of the simian virus 40 (“SV40”) is used for efficient polyadenylation. For easy selection of recombinant virus, the plasmid contains the beta-galactosidase gene from E. coli under control of a weak Drosophila promoter in the same orientation, followed by the polyadenylation signal of the polyhedrin gene. The inserted genes are flanked on both sides by viral sequences for cell-mediated homologous recombination with wild-type viral DNA to generate a viable virus that express the cloned polynucleotide.

[0764] Many other baculovirus vectors can be used in place of the vector above, such as pAc373, pVL941, and pAcIM1, as one skilled in the art would readily appreciate, as long as the construct provides appropriately located signals for transcription, translation, secretion and the like, including a signal peptide and an in-frame AUG as required. Such vectors are described, for instance, in Luckow et al., Virology 170:31-39 (1989).

[0765] Specifically, the cDNA sequence contained in the deposited clone, including the AUG initiation codon, is amplified using the PCR protocol described in Example 1. If a naturally occurring signal sequence is used to produce the polypeptide of the present invention, the pA2 vector does not need a second signal peptide. Alternatively, the vector can be modified (pA2 GP) to include a baculovirus leader sequence, using the standard methods described in Summers et al., “A Manual of Methods for Baculovirus Vectors and Insect Cell Culture Procedures,” Texas Agricultural Experimental Station Bulletin No. 1555 (1987).

[0766] The amplified fragment is isolated from a 1% agarose gel using a commercially available kit (“Geneclean,” BIO 101 Inc., La Jolla, Calif.). The fragment then is digested with appropriate restriction enzymes and again purified on a 1% agarose gel.

[0767] The plasmid is digested with the corresponding restriction enzymes and optionally, can be dephosphorylated using calf intestinal phosphatase, using routine procedures known in the art. The DNA is then isolated from a 1% agarose gel using a commercially available kit (“Geneclean” BIO 101 Inc., La Jolla, Calif.).

[0768] The fragment and the dephosphorylated plasmid are ligated together with T4 DNA ligase. E. coli HB101 or other suitable E. coli hosts such as XL-1 Blue (Stratagene Cloning Systems, La Jolla, Calif.) cells are transformed with the ligation mixture and spread on culture plates. Bacteria containing the plasmid are identified by digesting DNA from individual colonies and analyzing the digestion product by gel electrophoresis. The sequence of the cloned fragment is confirmed by DNA sequencing.

[0769] Five μg of a plasmid containing the polynucleotide is co-transfected with 1.0 μg of a commercially available linearized baculovirus DNA (“BaculoGold™ baculovirus DNA, Pharmingen, San Diego, Calif.), using the lipofection method described by Felgner et al., Proc. Natl. Acad. Sci. USA 84:7413-7417 (1987). One μg of BaculoGold™ virus DNA and 5 μg of the plasmid are mixed in a sterile well of a microtiter plate containing 50 μl of serum-free Grace's medium (Life Technologies Inc., Gaithersburg, Md.). Afterwards, 10 μl Lipofectin plus 90 μl Grace's medium are added, mixed and incubated for 15 minutes at room temperature. Then the transfection mixture is added drop-wise to Sf9 insect cells (ATCC CRL 1711) seeded in a 35 mm tissue culture plate with 1 ml Grace's medium without serum. The plate is then incubated for 5 hours at 27° C. The transfection solution is then removed from the plate and 1 ml of Grace's insect medium supplemented with 10% fetal calf serum is added. Cultivation is then continued at 27° C. for four days.

[0770] After four days the supernatant is collected and a plaque assay is performed, as described by Summers and Smith, supra. An agarose gel with “Blue Gal” (Life Technologies Inc., Gaithersburg) is used to allow easy identification and isolation of gal-expressing clones, which produce blue-stained plaques. (A detailed description of a “plaque assay” of this type can also be found in the user's guide for insect cell culture and baculovirology distributed by Life Technologies Inc., Gaithersburg, page 9-10.) After appropriate incubation, blue stained plaques are picked with the tip of a micropipettor (e.g., Eppendorf). The agar containing the recombinant viruses is then resuspended in a microcentrifuge tube containing 200 μl of Grace's medium and the suspension containing the recombinant baculovirus is used to infect Sf9 cells seeded in 35 mm dishes. Four days later the supernatants of these culture dishes are harvested and then they are stored at 4° C.

[0771] To verify the expression of the polypeptide, Sf9 cells are grown in Grace's medium supplemented with 10% heat-inactivated FBS. The cells are infected with the recombinant baculovirus containing the polynucleotide at a multiplicity of infection (“MOI”) of about 2. If radiolabeled proteins are desired, 6 hours later the medium is removed and is replaced with SF900 II medium minus methionine and cysteine (available from Life Technologies Inc., Rockville, Md.); After 42 hours, 5 μCi of ³⁵S-methionine and 5 μCi ³⁵S-cysteine (available from Amersham) are added. The cells are further incubated for 16 hours and then are harvested by centrifugation. The proteins in the supernatant as well as the intracellular proteins are analyzed by SDS-PAGE followed by autoradiography (if radiolabeled).

[0772] Microsequencing of the amino acid sequence of the amino terminus of purified protein may be used to determine the amino terminal sequence of the produced protein.

### Example 8

### Expression of a Polypeptide in Mammalian Cells

[0773] The polypeptide of the present invention can be expressed in a mammalian cell. A typical mammalian expression vector contains a promoter element, which mediates the initiation of transcription of mRNA, a protein coding sequence, and signals required for the termination of transcription and polyadenylation of the transcript. Additional elements include enhancers, Kozak sequences and intervening sequences flanked by donor and acceptor sites for RNA splicing. Highly efficient transcription is achieved with the early and late promoters from SV40, the long terminal repeats (LTRs) from Retroviruses, e.g., RSV, HTLVI, HIVI and the early promoter of the cytomegalovirus (CMV). However, cellular elements can also be used (e.g., the human actin promoter).

[0774] Suitable expression vectors for use in practicing the present invention include, for example, vectors such as pSVL and pMSG (Pharmacia, Uppsala, Sweden), pRSVcat (ATCC 37152), pSV2dhfr (ATCC 37146), pBC12MI (ATCC 67109), pCMVSport 2.0, and pCMVSport 3.0. Mammalian host cells that could be used include, human Hela, 293, H9 and Jurkat cells, mouse NIH3T3 and C127 cells, Cos 1, Cos 7 and CV1, quail QC1-3 cells, mouse L cells and Chinese hamster ovary (CHO) cells.

[0775] Alternatively, the polypeptide can be expressed in stable cell lines containing the polynucleotide integrated into a chromosome. The co-transfection with a selectable marker such as DHFR, gpt, neomycin, or hygromycin allows the identification and isolation of the transfected cells.

[0776] The transfected gene can also be amplified to express large amounts of the encoded protein. The DHF (dihydrofolate reductase) marker is useful in developing cell lines that carry several hundred or even several thousand copies of the gene of interest. (See, e.g., Alt, F. W., et al., J. Biol. Chem 253:1357-1370 (1978); Hamlin, J. L. and Ma, C., Biochem. et Biophys. Acta, 1097:107-143 (1990); Page, M. J. and Sydenham, M. A., Biotechnology 9:64-68 (1991)). Another useful selection marker is the enzyme glutamine synthase (GS) (Murphy et al., Biochem J. 227:277-279 (1991); Bebbington et al., Bio/Technology 10:169-175 (1992). Using these markers, the mammalian cells are grown in selective medium and the cells with the highest resistance are selected. These cell lines contain the amplified gene(s) integrated into a chromosome. Chinese hamster ovary (CHO) and NSO cells are often used for the production of proteins.

[0777] Derivatives of the plasmid pSV2-dhfr (ATCC Accession No. 37146), the expression vectors pC4 (ATCC Accession No. 209646) and pC6 (ATCC Accession No. 209647) contain the strong promoter (LTR) of the Rous Sarcoma Virus (Cullen et al., Molecular and Cellular Biology, 438-447 (March, 1985)) plus a fragment of the CMV-enhancer (Boshart et al., Cell 41:521-530 (1985)). Multiple cloning sites, e.g., with the restriction enzyme cleavage sites BamHI, XbaI and Asp718, facilitate the cloning of the gene of interest. The vectors also contain the 3′ intron, the polyadenylation and termination signal of the rat preproinsulin gene, and the mouse DHFR gene under control of the SV40 early promoter.

[0778] Specifically, the plasmid pC6, for example, is digested with appropriate restriction enzymes and then dephosphorylated using calf intestinal phosphates by procedures known in the art. The vector is then isolated from a 1% agarose gel.

[0779] A polynucleotide of the present invention is amplified according to the protocol outlined in Example 1. If a naturally occurring signal sequence is used to produce the polypeptide of the present invention, the vector does not need a second signal peptide. Alternatively, if a naturally occurring signal sequence is not used, the vector can be modified to include a heterologous signal sequence. (See, e.g., International Publication No. WO 96/34891.)

[0780] The amplified fragment is isolated from a 1% agarose gel using a commercially available kit (“Geneclean,” BIO 101 Inc., La Jolla, Calif.). The fragment then is digested with appropriate restriction enzymes and again purified on a 1% agarose gel.

[0781] The amplified fragment is then digested with the same restriction enzyme and purified on a 1% agarose gel. The isolated fragment and the dephosphorylated vector are then ligated with T4 DNA ligase. E. coli HB101 or XL-1 Blue cells are then transformed and bacteria are identified that contain the fragment inserted into plasmid pC6 using, for instance, restriction enzyme analysis.

[0782] Chinese hamster ovary cells lacking an active DHFR gene is used for transfection. Five jig of the expression plasmid pC6 or pC4 is cotransfected with 0.5 ,ug of the plasmid pSVneo using lipofectin (Felgner et al., supra). The plasmid pSV2-neo contains a dominant selectable marker, the neo gene from Tn5 encoding an enzyme that confers resistance to a group of antibiotics including G418. The cells are seeded in alpha minus MEM supplemented with 1 mg/ml G418. After 2 days, the cells are trypsinized and seeded in hybridoma cloning plates (Greiner, Germany) in alpha minus MEM supplemented with 10, 25, or 50 ng/ml of methotrexate plus 1 mg/ml G418. After about 10-14 days single clones are trypsinized and then seeded in 6-well petri dishes or 10 ml flasks using different concentrations of methotrexate (50 DM, 100 nM, 200 nM, 400 nM, 800 nM). Clones growing at the highest concentrations of methotrexate are then transferred to new 6-well plates containing even higher concentrations of methotrexate (1 μM, 2 μM, 5 μM, 10 mM, 20 mM). The same procedure is repeated until clones are obtained which grow at a concentration of 100-200 μM. Expression of the desired gene product is analyzed, for instance, by SDS-PAGE and Western blot or by reversed phase HPLC analysis.

### Example 9

### Protein Fusions

[0783] The polypeptides of the present invention are preferably fused to other proteins. These fusion proteins can be used for a variety of applications. For example, fusion of the present polypeptides to His-tag, HA-tag, protein A, IgG domains, and maltose binding protein facilitates purification. (See Example 5; see also EP A 394,827; Traunecker, et al., Nature 331:84-86 (1988)). Similarly, fusion to IgG-1, IgG-3, and albumin increases the halflife time in vivo. Nuclear localization signals fused to the polypeptides of the present invention can target the protein to a specific subcellular localization, while covalent heterodimer or homodimers can increase or decrease the activity of a fusion protein. Fusion proteins can also create chimeric molecules having more than one function. Finally, fusion proteins can increase solubility and/or stability of the fused protein compared to the non-fused protein. All of the types of fusion proteins described above can be made by modifying the following protocol, which outlines the fusion of a polypeptide to an IgG molecule, or the protocol described in Example 5.

[0784] Briefly, the human Fc portion of the IgG molecule can be PCR amplified, using primers that span the 5′ and 3′ ends of the sequence described below. These primers also should have convenient restriction enzyme sites that will facilitate cloning into an expression vector, preferably mammalian expression vector.

[0785] For example, if pC4 (ATCC Accession No. 209646) is used, the human Fc portion can be ligated into the BamHI cloning site. Note that the 3′ BamHI site should be destroyed. Next, the vector containing the human Fc portion is re-restricted with BamHI, linearizing the vector, and a polynucleotide of the present invention, isolated by the PCR protocol described in Example 1, is ligated into this BamHI site. Note that the polynucleotide is cloned without a stop codon, otherwise a fusion protein will not be produced.

[0786] If the naturally occurring signal sequence is used to produce the polypeptide of the present invention, pC4 does not need a second signal peptide. Alternatively, if the naturally occurring signal sequence is not used, the vector can be modified to include a heterologous signal sequence. (See, e.g., International Publication No. WO 96/34891.)

[0787] Human IgG Fc Region:

| | |
|---|---|
| GGGATCCGGAGCCCAAATCTTCTGACAAAACTCACACATGCCCACCGTGCCCA | (SEQ ID NO: 1) |
| GCACCTGAATTCGAGGGTGCACCGTCAGTCTTCCTCTTCCCCCCAAAACCCAAGGACA | |
| CCCTCATGATCTCCCGGACTCCTGAGGTCACATGCGTGGTGGTGGACGTAAGCCACGA | |
| AGACCCTGAGGTCAAGTTCAACTGGTACGTGGACGGCGTGGAGGTGCATAATGCCAA | |
| GACAAAGCCGCGGGAGGAGCAGTACAACAGCACGTACCGTGTGGTCAGCGTCCTCAC | |
| CGTCCTGCACCAGGACTGGCTGAATGGCAAGGAGTACAAGTGCAAGGTCTCCAACAA | |
| AGCCCTCCCAACCCCCATCGAGAAAACCATCTCCAAAGCCAAAGGGCAGCCCCGAGA | |
| ACCACAGGTGTACACCGTGCCCCCATCCCGGGATGAGCTGACCAAGAACCAGGTCAG | |
| CCTGACCTGCCTGGTCAAAGGCTTGTATCCAAGCGACATCGCCGTGGAGTGGGAGAG | |
| CAATGGGCAGCCGGAGAACAACTACAAGACCACGCCTCCCGTGCTGGACTCCGACGG | |
| CTCCTTCTTCCTCTACAGCAAGCTCACCGTGGACAAGAGCAGGTGGCAGCAGGGGAA | |
| CGTCTTCTCATGCTCCGTGATGCATGAGGCTCTGCACAACCACTACACGCAGAAGAGC | |
| CTCTCCCTGTCTCCGGGTAAATGAGTGCGACGGCCGCGACTCTAGAGGAT | |

### Example 10

### Production of an Antibody from a Polypeptide

[0788] a) Hybridoma Technology

[0789] The antibodies of the present invention can be prepared by a variety of methods. (See, Current Protocols, Chapter 2.) As one example of such methods, cells expressing a polypeptide of the present invention are administered to an animal to induce the production of sera containing polyclonal antibodies. In a preferred method, a preparation of a polypeptide of the present invention is prepared and purified to render it substantially free of natural contaminants. Such a preparation is then introduced into an animal in order to produce polyclonal antisera of greater specific activity.

[0790] Monoclonal antibodies specific for a polypeptide of the present invention are prepared using hybridoma technology (Kohler et al., Nature 256:495 (1975); Kohler et al., Eur. J. Immunol. 6:511 (1976); Kohler et al., Eur. J. Immunol. 6:292 (1976); Hammerling et al., in: Monoclonal Antibodies and T-Cell Hybridomas, Elsevier, N.Y., pp. 563-681 (1981)). In general, an animal (preferably a mouse) is immunized with a polypeptide of the present invention or, more preferably, with a secreted polypeptide-expressing cell. Such polypeptide-expressing cells are cultured in any suitable tissue culture medium, preferably in Earle's modified Eagle's medium supplemented with 10% fetal bovine serum (inactivated at about 56° C.), and supplemented with about 10 g/l of nonessential amino acids, about 1,000 U/ml of penicillin, and about 100 μg/ml of streptomycin.

[0791] The splenocytes of such mice are extracted and fused with a suitable myeloma cell line. Any suitable myeloma cell line may be employed in accordance with the present invention; however, it is preferable to employ the parent myeloma cell line (SP2O), available from the ATCC. After fusion, the resulting hybridoma cells are selectively maintained in HAT medium, and then cloned by limiting dilution as described by Wands et al. (Gastroenterology 80:225-232 (1981)). The hybridoma cells obtained through such a selection are then assayed to identify clones which secrete antibodies capable of binding the polypeptide of the present invention.

[0792] Alternatively, additional antibodies capable of binding to a polypeptide of the present invention can be produced in a two-step procedure using anti-idiotypic antibodies. Such a method makes use of the fact that antibodies are themselves antigens, and therefore, it is possible to obtain an antibody which binds to a second antibody. In accordance with this method, protein specific antibodies are used to immunize an animal, preferably a mouse. The splenocytes of such an animal are then used to produce hybridoma cells, and the hybridoma cells are screened to identify clones which produce an antibody whose ability to bind to the polypeptide-specific antibody can be blocked by said polypeptide. Such antibodies comprise anti-idiotypic antibodies to the polypeptide-specific antibody and are used to immunize an animal to induce formation of further polypeptide-specific antibodies.

[0793] For in vivo use of antibodies in humans, an antibody is “humanized”. Such antibodies can be produced using genetic constructs derived from hybridoma cells producing the monoclonal antibodies described above. Methods for producing chimeric and humanized antibodies are known in the art and are discussed herein. (See, for review, Morrison, Science 229:1202 (1985); Oi et al., BioTechniques 4:214 (1986); Cabilly et al., U.S. Pat. No. 4,816,567; Taniguchi et al., EP 171496; Morrison et al., EP 173494; Neuberger et al., WO 8601533; Robinson et al., International Publication No. WO 8702671; Boulianne et al., Nature 312:643 (1984); Neuberger et al., Nature 314:268 (1985)).

[0794] b) Isolation of Antibody Fragments Directed Against a Polypeptide of the Present Invention From a Library of scFvs

[0795] Naturally occurring V-genes isolated from human PBLs are constructed into a library of antibody fragments which contain reactivities against a polypeptide of the present invention to which the donor may or may not have been exposed (see e.g., U.S. Pat. No. 5,885,793 incorporated herein by reference in its entirety).

[0796] Rescue of the Library. A library of scFvs is constructed from the RNA of human PBLs as described in International Publication No. WO 92/01047. To rescue phage displaying antibody fragments, approximately 10⁹ E. coli harboring the phagemid are used to inoculate 50 ml of 2×TY containing 1% glucose and 100 μg/ml of ampicillin (2×TY-AMP-GLU) and grown to an O.D. of 0.8 with shaking. Five ml of this culture is used to inoculate 50 ml of 2×TY-AMP-GLU, 2×108 TU of delta gene 3 helper (M13 delta gene III, see International Publication No. WO 92101047) are added and the culture incubated at 37° C. for 45 minutes without shaking and then at 37° C. for 45 minutes with shaking. The culture is centrifuged at 4000 r.p.m. for 10 min. and the pellet resuspended in 2 liters of 2×TY containing 100 μg/ml ampicillin and 50 ug/ml kanamycin and grown overnight. Phage are prepared as described in International Publication No. WO 92/01047.

[0797] M13 delta gene III is prepared as follows: M13 delta gene III helper phage does not encode gene III protein, hence the phage(mid) displaying antibody fragments have a greater avidity of binding to antigen. Infectious M13 delta gene m particles are made by growing the helper phage in cells harboring a pUC19 derivative supplying the wild type gene III protein during phage morphogenesis. The culture is incubated for 1 hour at 37° C. without shaking and then for a further hour at 37° C. with shaking. Cells are spun down (IFC-Centra 8,400 r.p.m. for 10 min), resuspended in 300 ml 2×TY broth containing 100 μg ampicillin/ml and 25 μg kanamycin/ml (2×TY-AMP-KAN) and grown overnight, shaking at 37° C. Phage particles are purified and concentrated from the culture medium by two PEG-precipitations (Sambrook et al., 1990), resuspended in 2 ml PBS and passed through a 0.45 μm filter (Minisart NML; Sartorius) to give a final concentration of approximately 10¹³ transducing units/ml (ampicillin-resistant clones).

[0798] Panning of the Library. Immunotubes (Nunc) are coated overnight in PBS with 4 ml of either 100 μg/ml or 10 μg/ml of a polypeptide of the present invention. Tubes are blocked with 2% Marvel-PBS for 2 hours at 37° C. and then washed 3 times in PBS. Approximately 10¹³ TU of phage is applied to the tube and incubated for 30 minutes at room temperature tumbling on an over and under turntable and then left to stand for another 1.5 hours. Tubes are washed 10 times with PBS 0.1% Tween-20 and 10 times with PBS. Phage are eluted by adding 1 ml of 100 mM triethylamine and rotating 15 minutes on an under and over turntable after which the solution is immediately neutralized with 0.5 ml of 1.0 M Tris-HCl, pH 7.4. Phage are then used to infect 10 ml of mid-log E. coli TG1 by incubating eluted phage with bacteria for 30 minutes at 37° C. The E. coli are then plated on TYE plates containing 1% glucose and 100 μg/ml ampicillin. The resulting bacterial library is then rescued with delta gene 3 helper phage as described above to prepare phage for a subsequent round of selection. This process is then repeated for a total of 4 rounds of affinity purification with tube-washing increased to 20 times with PBS, 0.1% Tween-20 and 20 times with PBS for rounds 3 and 4.

[0799] Characterization of Binders. Eluted phage from the 3rd and 4th rounds of selection are used to infect E. coli HB 2151 and soluble scFv is produced (Marks, et al., 1991) from single colonies for assay. ELISAs are performed with microtitre plates coated with either 10 pg/ml of the polypeptide of the present invention in 50 mM bicarbonate pH 9.6. Clones positive in ELISA are further characterized by PCR fingerprinting (see, e.g., International Publication No. WO 92/01047) and then by sequencing. These ELISA positive clones may also be further characterized by techniques known in the art, such as, for example, epitope mapping, binding affinity, receptor signal transduction, ability to block or competitively inhibit antibody/antigen binding, and competitive agonistic or antagonistic activity.

### Example 11

### Method of Determining Alterations in a Gene Corresponding to a Polynucleotide

[0800] RNA isolated from entire families or individual patients presenting with a gastrointestinal disease or disorder is isolated. cDNA is then generated from these RNA samples using protocols known in the art. (See, Sambrook.) The cDNA is then used as a template for PCR, employing primers surrounding regions of interest in SEQ ID NO:X; and/or the nucleotide sequence of the cDNA contained in ATCC Deposit No:Z. Suggested PCR conditions consist of 35 cycles at 95 degrees C. for 30 seconds; 60-120 seconds at 52-58 degrees C.; and 60-120 seconds at 70 degrees C., using buffer solutions described in Sidransky et al., Science 252:706 (1991).

[0801] PCR products are then sequenced using primers labeled at their 5′ end with T4 polynucleotide kinase, employing SequiTherm Polymerase (Epicentre Technologies). The intron-exon boundaries of selected exons is also determined and genomic PCR products analyzed to confirm the results. PCR products harboring suspected mutations are then cloned and sequenced to validate the results of the direct sequencing.

[0802] PCR products are cloned into T-tailed vectors as described in Holton et al., Nucleic Acids Research, 19:1156 (1991) and sequenced with T7 polymerase (United States Biochemical). Affected individuals are identified by mutations not present in unaffected individuals.

[0803] Genomic rearrangements are also observed as a method of determining alterations in a gene corresponding to a polynucleotide. Genomic clones isolated according to Example 2 are nick-translated with digoxigenindeoxy-uridine 5′-triphosphate (Boehringer Manheim), and FISH performed as described in Johnson et al., Methods Cell Biol. 35:73-99 (1991). Hybridization with the labeled probe is carried out using a vast excess of human cot-1 DNA for specific hybridization to the corresponding genomic locus.

[0804] Chromosomes are counterstained with 4,6-diamino-2-phenylidole and propidium iodide, producing a combination of C- and R-bands. Aligned images for precise mapping are obtained using a triple-band filter set (Chroma Technology, Brattleboro, Vt.) in combination with a cooled charge-coupled device camera (Photometrics, Tucson, Ariz.) and variable excitation wavelength filters. (Johnson et al., Genet. Anal. Tech. Appl., 8:75 (1991)). Image collection, analysis and chromosomal fractional length measurements are performed using the ISee Graphical Program System. (Inovision Corporation, Durham, N.C.) Chromosome alterations of the genomic region hybridized by the probe are identified as insertions, deletions, and translocations. These alterations are used as a diagnostic marker for an associated disease.

### Example 12

### Method of Detecting Abnormal Levels of a Polypeptide in a Biological Sample

[0805] A polypeptide of the present invention can be detected in a biological sample, and if an increased or decreased level of the polypeptide is detected, this polypeptide is a marker for a particular phenotype. Methods of detection are numerous, and thus, it is understood that one skilled in the art can modify the following assay to fit their particular needs.

[0806] For example, antibody-sandwich ELISAs are used to detect polypeptides in a sample, preferably a biological sample. Wells of a microtiter plate are coated with specific antibodies, at a final concentration of 0.2 to 10 ug/ml. The antibodies are either monoclonal or polyclonal and are produced by the method described in Example 10. The wells are blocked so that non-specific binding of the polypeptide to the well is reduced.

[0807] The coated wells are then incubated for >2 hours at RT with a sample containing the polypeptide. Preferably, serial dilutions of the sample should be used to validate results. The plates are then washed three times with deionized or distilled water to remove unbound polypeptide.

[0808] Next, 50 ul of specific antibody-alkaline phosphatase conjugate, at a concentration of 25-400 ng, is added and incubated for 2 hours at room temperature. The plates are again washed three times with deionized or distilled water to remove unbound conjugate.

[0809] Add 75 ul of 4-methylumbelliferyl phosphate SUP) or p-nitrophenyl phosphate (NPP) substrate solution to each well and incubate 1 hour at room temperature. Measure the reaction by a microtiter plate reader. Prepare a standard curve, using serial dilutions of a control sample, and plot polypeptide concentration on the X-axis (log scale) and fluorescence or absorbance of the Y-axis (linear scale). Interpolate the concentration of the polypeptide in the sample using the standard curve.

### Example 13

### Formulation

[0810] The invention also provides methods of preventing, treating and/or ameliorating a gastrointestinal disease or disorder by administration to a subject of an effective amount of a Therapeutic. By therapeutic is meant polynucleotides or polypeptides of the invention (including fragments and variants), agonists or antagonists thereof, and/or antibodies thereto, in combination with a pharmaceutically acceptable carrier type (e.g., a sterile carrier).

[0811] The Therapeutic will be formulated and dosed in a fashion consistent with good medical practice, taking into account the clinical condition of the individual patient (especially the side effects of treatment with the Therapeutic alone), the site of delivery, the method of administration, the scheduling of administration, and other factors known to practitioners. The “effective amount” for purposes herein is thus determined by such considerations.

[0812] As a general proposition, the total pharmaceutically effective amount of the Therapeutic administered parenterally per dose will be in the range of about 1 ug/kg/day to 10 mg/kg/day of patient body weight, although, as noted above, this will be subject to therapeutic discretion. More preferably, this dose is at least 0.01 mg/kg/day, and most preferably for humans between about 0.01 and 1 mg/kg/day for the hormone. If given continuously, the Therapeutic is typically administered at a dose rate of about 1 ug/kg/hour to about 50 ug/kg/hour, either by 14 injections per day or by continuous subcutaneous infusions, for example, using a mini-pump. An intravenous bag solution may also be employed. The length of treatment needed to observe changes and the interval following treatment for responses to occur appears to vary depending on the desired effect.

[0813] Therapeutics can be are administered orally, rectally, parenterally, intracistemally, intravaginally, intraperitoneally, topically (as by powders, ointments, gels, drops or transdermal patch), bucally, or as an oral or nasal spray. “Pharmaceutically acceptable carrier” refers to a non-toxic solid, semisolid or liquid filler, diluent, encapsulating material or formulation auxiliary of any. The term “parenteral” as used herein refers to modes of administration which include intravenous, intramuscular, intraperitoneal, intrasternal, subcutaneous and intraarticular injection and infusion.

[0814] Therapeutics of the invention are also suitably administered by sustained-release systems. Suitable examples of sustained-release Therapeutics are administered orally, rectally, parenterally, intracistemally, intravaginally, intraperitoneally, topically (as by powders, ointments, gels, drops or transdermal patch), bucally, or as an oral or nasal spray. “Pharmaceutically acceptable carrier” refers to a non-toxic solid, semisolid or liquid filler, diluent, encapsulating material or formulation auxiliary of any type. The term “parenteral” as used herein refers to modes of administration which include intravenous, intramuscular, intraperitoneal, intrasternal, subcutaneous and intraarticular injection and infusion.

[0815] Therapeutics of the invention are also suitably administered by sustained-release systems. Suitable examples of sustained-release Therapeutics include suitable polymeric materials (such as, for example, semi-permeable polymer matrices in the form of shaped articles, e.g., films, or mirocapsules), suitable hydrophobic materials (for example as an emulsion in an acceptable oil) or ion exchange resins, and sparingly soluble derivatives (such as, for example, a sparingly soluble salt).

[0816] Sustained-release matrices include polylactides (U.S. Pat. No. 3,773,919, EP 58,481), copolymers of L-glutamic acid and gamma-ethyl-L-glutamate (Sidman et al., Biopolymers 22:547-556 (1983)), poly (2-hydroxyethyl methacrylate) (Langer et al., J. Biomed. Mater. Res. 15:167-277 (1981), and Langer, Chem. Tech. 12:98-105 (1982)), ethylene vinyl acetate (Langer et al., Id.) or poly-D-(−)-3-hydroxybutyric acid (EP 133,988).

[0817] In a preferred embodiment, polypeptide, polynucleotide, and antibody compositions of the invention are formulated in a biodegradable, polymeric drug delivery system, for example as described in U.S. Pat. Nos. 4,938,763; 5,278,201; 5,278,202; 5,324,519; 5,340,849; and 5,487,897 and in International Publication Numbers WO01/35929, WO00/24374, and WO00/06117 which are hereby incorporated by reference in their entirety. In specific preferred embodiments the polypeptide, polynucleotide, and antibody compositions of the invention are formulated using the ATRIGEL® Biodegradable System of Atrix Laboratories, Inc. (Fort Collins, Colo.).

[0818] Examples of biodegradable polymers which can be used in the formulation of polypeptide, polynucleotide, and antibody compositions, include but are not limited to, polylactides, polyglycolides, polycaprolactones, polyanhydrides, polyamides, polyurethanes, polyesteramides, polyorthoesters, polydioxanones, polyacetals, polyketals, polycarbonates, polyorthocarbonates, polyphosphazenes, polyhydroxybutyrates, polyhydroxyvalerates, polyalkylene oxalates, polyalkylene succinates, poly(malic acid), poly(amino acids), poly(methyl vinyl ether), poly(maleic anhydride), polyvinylpyrrolidone, polyethylene glycol, polyhydroxycellulose, chitin, chitosan, and copolymers, terpolymers, or combinations or mixtures of the above materials. The preferred polymers are those that have a lower degree of crystallization and are more hydrophobic. These polymers and copolymers are more soluble in the biocompatible solvents than the highly crystalline polymers such as polyglycolide and chitin which also have a high degree of hydrogen-bonding. Preferred materials with the desired solubility parameters are the polylactides, polycaprolactones, and copolymers of these with glycolide in which there are more amorphous regions to enhance solubility. In specific preferred embodiments, the biodegradable polymers which can be used in the formulation of polypeptide, polynucleotide, and antibody compositions are poly(lactide-co-glycolides). Polymer properties such as molecular weight, hydrophobicity, and lactide/glycolide ratio may be modified to obtain the desired polypeptide, polynucleotide, or antibody release profile (See, e.g., Ravivarapu et al., Journal of Pharmaceutical Sciences 89:732-741 (2000), which is hereby incorporated by reference in its entirety).

[0819] It is also preferred that the solvent for the biodegradable polymer be non-toxic, water miscible, and otherwise biocompatible. Examples of such solvents include, but are not limited to, N-methyl-2-pyrrolidone, 2-pyrrolidone, C2 to C6 alkanols, C1 to C15 alchohols, dils, triols, and tetraols such as ethanol, glycerine propylene glycol, butanol; C3 to C15 alkyl ketones such as acetone, diethyl ketone and methyl ethyl ketone; C3 to C15 esters such as methyl acetate, ethyl acetate, ethyl lactate; allyl ketones such as methyl ethyl ketone, C1 to C15 amides such as dimethylformamide, dimethylacetamide and caprolactam; C3 to C20 ethers such as tetrahydrofuran, or solketal; tweens, triacetin, propylene carbonate, decylmethylsulfoxide, dimethyl sulfoxide, oleic acid, 1-dodecylazacycloheptan-2-one, Other preferred solvents are benzyl alchohol, benzyl benzoate, dipropylene glycol, tributyrin, ethyl oleate, glycerin, glycofural, isopropyl myristate, isopropyl palmitate, oleic acid, polyethylene glycol, propylene carbonate, and triethyl citrate. The most preferred solvents are N-methyl-2-pyrrolidone, 2-pyrrolidone, dimethyl sulfoxide, triacetin, and propylene carbonate because of the solvating ability and their compatibility.

[0820] Additionally, formulations comprising polypeptide, polynucleotide, and antibody compositions and a biodegradable polymer may also include release-rate modification agents and/or pore-forming agents. Examples of release-rate modification agents include, but are not limited to, fatty acids, triglycerides, other like hydrophobic compounds, organic solvents, plasticizing compounds and hydrophilic compounds. Suitable release rate modification agents include, for example, esters of mono-, di-, and tricarboxylic acids, such as 2-ethoxyethyl acetate, methyl acetate, ethyl acetate, diethyl phthalate, dimethyl phthalate, dibutyl phthalate, dimethyl adipate, dimethyl succinate, dimethyl oxalate, dimethyl citrate, triethyl citrate, acetyl tributyl citrate, acetyl triethyl citrate, glycerol triacetate, di(n-butyl) sebecate, and the like; polyhydroxy alcohols, such as propylene glycol, polyethylene glycol, glycerin, sorbitol, and the like; fatty acids; triesters of glycerol, such as triglycerides, epoxidized soybean oil, and other epoxidized vegetable oils; sterols, such as cholesterol; alcohols, such as C.sub.6-C.sub.12 alkanols, 2-ethoxyethanol. The release rate modification agent may be used singly or in combination with other such agents. Suitable combinations of release rate modification agents include, but are not limited to, glycerin/propylene glycol, sorbitol/glycerine, ethylene oxide/propylene oxide, butylene glycol/adipic acid, and the like. Preferred release rate modification agents include, but are not limited to, dimethyl citrate, triethyl citrate, ethyl heptanoate, glycerin, and hexanediol. Suitable pore-forming agents that may be used in the polymer composition include, but are not limited to, sugars such as sucrose and dextrose, salts such as sodium chloride and sodium carbonate, polymers such as hydroxylpropylcellulose, carboxymethylcellulose, polyethylene glycol, and polyvinylpyrrolidone. Solid crystals that will provide a defined pore size, such as salt or sugar, are preferred.

[0821] In specific preferred embodiments the polypeptide, polynucleotide, and antibody compositions of the invention are formulated using the BEMA™ BioErodible Mucoadhesive System, MCA™ MucoCutaneous Absorption System, SMP™ Solvent MicroParticle System, or BCP™ BioCompatible Polymer System of Atrix Laboratories, Inc. (Fort Collins, Colo.).

[0822] Sustained-release Therapeutics also include liposomally entrapped Therapeutics of the invention (see generally, Langer, Science 249:1527-1533 (1990); Treat et al., in Liposomes in the Therapy of Infectious Disease and Cancer, Lopez-Berestein and Fidler (eds.), Liss, N.Y., pp. 317 -327 and 353-365 (1989)). Liposomes containing the Therapeutic are prepared by methods known per se: U.S. Pat. No. DE 3,218,121; Epstein et al., Proc. Natl. Acad. Sci. (USA) 82:3688-3692 (1985); Hwang et al., Proc. Natl. Acad. Sci.(USA) 77:4030-4034 (1980); EP 52,322; EP 36,676; EP 88,046; EP 143,949; EP 142,641; Japanese Pat. Appl. 83-118008; U.S. Pat. Nos. 4,485,045 and 4,544,545; and EP 102,324. Ordinarily, the liposomes are of the small (about 200-800 Angstroms) unilamellar type in which the lipid content is greater than about 30 mol. percent cholesterol, the selected proportion being adjusted for the optimal Therapeutic.

[0823] In yet an additional embodiment, the Therapeutics of the invention are delivered by way of a pump (see Langer, supra; Sefton, CRC Crit. Ref. Biomed. Eng. 14:201 (1987); Buchwald et al., Surgery 88:507 (1980); Saudek et al., N. Engl. J. Med. 321:574 (1989)).

[0824] Other controlled release systems are discussed in the review by Langer (Science 249:1527-1533 (1990)).

[0825] For parenteral administration, in one embodiment, the Therapeutic is formulated generally by mixing it at the desired degree of purity, in a unit dosage injectable form (solution, suspension, or emulsion), with a pharmaceutically acceptable carrier, i.e., one that is non-toxic to recipients at the dosages and concentrations employed and is compatible with other ingredients of the formulation. For example, the formulation preferably does not include oxidizing agents and other compounds that are known to be deleterious to the Therapeutic.

[0826] Generally, the formulations are prepared by contacting the Therapeutic uniformly and intimately with liquid carriers or finely divided solid carriers or both. Then, if necessary, the product is shaped into the desired formulation. Preferably the carrier is a parenteral carrier, more preferably a solution that is isotonic with the blood of the recipient. Examples of such carrier vehicles include water, saline, Ringer's solution, and dextrose solution. Non-aqueous vehicles such as fixed oils and ethyl oleate are also usefull herein, as well as liposomes.

[0827] The carrier suitably contains minor amounts of additives such as substances that enhance isotonicity and chemical stability. Such materials are non-toxic to recipients at the dosages and concentrations employed, and include buffers such as phosphate, citrate, succinate, acetic acid, and other organic acids or their salts; antioxidants such as ascorbic acid; low molecular weight (less than about ten residues) polypeptides, e.g., polyarginine or tripeptides; proteins, such as serum albumin, gelatin, or immunoglobulins; hydrophilic polymers such as polyvinylpyrrolidone; amino acids, such as glycine, glutamic acid, aspartic acid, or arginine; monosaccharides, disaccharides, and other carbohydrates including cellulose or its derivatives, glucose, manose, or dextrins; chelating agents such as EDTA; sugar alcohols such as mannitol or sorbitol; counterions such as sodium; and/or nonionic surfactants such as polysorbates, poloxamers, or PEG.

[0828] The Therapeutic is typically formulated in such vehicles at a concentration of about 0.1 mg/ml to 100 mg/ml, preferably 1-10 mg/ml, at a pH of about 3 to 8. It will be understood that the use of certain of the foregoing excipients, carriers, or stabilizers will result in the formation of polypeptide salts.

[0829] Any pharmaceutical used for therapeutic administration can be sterile. Sterility is readily accomplished by filtration through sterile filtration membranes (e.g., 0.2 micron membranes). Therapeutics generally are placed into a container having a sterile access port, for example, an intravenous solution bag or vial having a stopper pierceable by a hypodermic injection needle.

[0830] Therapeutics ordinarily will be stored in unit or multi-dose containers, for example, sealed ampoules or vials, as an aqueous solution or as a lyophilized formulation for reconstitution. As an example of a lyophilized formulation, 10-ml vials are filled with 5 ml of sterile-filtered 1% (w/v) aqueous Therapeutic solution, and the resulting mixture is lyophilized. The infusion solution is prepared by reconstituting the lyophilized Therapeutic using bacteriostatic Water-for-injection.

[0831] The invention also provides a pharmaceutical pack or kit comprising one or more containers filled with one or more of the ingredients of the Therapeutics of the invention. Associated with such container(s) can be a notice in the form prescribed by a governmental agency regulating the manufacture, use or sale of pharmaceuticals or biological products, which notice reflects approval by the agency of manufacture, use or sale for human administration. In addition, the Therapeutics may be employed in conjunction with other therapeutic compounds.

[0832] The Therapeutics of the invention may be administered alone or in combination with adjuvants. Adjuvants that may be administered with the Therapeutics of the invention include, but are not limited to, alum, alum plus deoxycholate (ImmunoAg), MIP-PE (Biocine Corp.), QS21 (Genentech, Inc.), BCG (e.g., THERACYS®), MPL and nonviable prepartions of Corynebacterium parvum. In a specific embodiment, Therapeutics of the invention are administered in combination with alum. In another specific embodiment, Therapeutics of the invention are administered in combination with QS-21. Further adjuvants that may be administered with the Therapeutics of the invention include, but are not limited to, Monophosphoryl lipid immunomodulator, AdjuVax 100a, QS-21, QS-18, CRL1005, Aluminum salts, MF-59, and Virosomal adjuvant technology. Vaccines that may be administered with the Therapeutics of the invention include, but are not limited to, vaccines directed toward protection against MMR (measles, mumps, rubella), polio, varicella, tetanus/diptheria, hepatitis A, hepatitis B, haemophilus influenzae B, whooping cough, pneumonia, influenza, Lyme's Disease, rotavirus, cholera, yellow fever, Japanese encephalitis, poliomyelitis, rabies, typhoid fever, and pertussis. Combinations may be administered either concomitantly, e.g., as an admixture, separately but simultaneously or concurrently; or sequentially. This includes presentations in which the combined agents are administered together as a therapeutic mixture, and also procedures in which the combined agents are administered separately but simultaneously, e.g., as through separate intravenous lines into the same individual. Administration “in combination” further includes the separate administration of one of the compounds or agents given first, followed by the second.

[0833] The Therapeutics of the invention may be administered alone or in combination with other therapeutic agents. Therapeutic agents that may be administered in combination with the Therapeutics of the invention, include but not limited to, chemotherapeutic agents, antibiotics, steroidal and non-steroidal anti-inflammatories, conventional immunotherapeutic agents, and/or therapeutic treatments described below. Combinations may be administered either concomitantly, e.g., as an admixture, separately but simultaneously or concurrently; or sequentially. This includes presentations in which the combined agents are administered together as a therapeutic mixture, and also procedures in which the combined agents are administered separately but simultaneously, e.g., as through separate intravenous lines into the same individual. Administration “in combination” further includes the separate administration of one of the compounds or agents given first, followed by the second.

[0834] In one embodiment, the Therapeutics of the invention are administered in combination with an anticoagulant. Anticoagulants that may be administered with the compositions of the invention include, but are not limited to, heparin, low molecular weight heparin, warfarin sodium (e.g., COUMADIN®), dicumarol, 4-hydroxycoumarin, anisindione (e.g., MIRADON™), acenocoumarol (e.g., nicoumalone, SINTHROME™), indan-1,3-dione, phenprocoumon (e.g., MARCUMAR™), ethyl biscoumacetate (e.g., TROMEXAN™), and aspirin. In a specific embodiment, compositions of the invention are administered in combination with heparin and/or warfarin. In another specific embodiment, compositions of the invention are administered in combination with warfarin. In another specific embodiment, compositions of the invention are administered in combination with warfarin and aspirin. In another specific embodiment, compositions of the invention are administered in combination with heparin. In another specific embodiment, compositions of the invention are administered in combination with heparin and aspirin.

[0835] In another embodiment, the Therapeutics of the invention are administered in combination with thrombolytic drugs. Thrombolytic drugs that may be administered with the compositions of the invention include, but are not limited to, plasminogen, lys-plasminogen, alpha2-antiplasmin, streptokinae (e.g., KABIKINASE™), antiresplace (e.g., EMINASE™), tissue plasminogen activator (t-PA, altevase, ACTIVASE™), urokinase (e.g., ABBOKINASE™), sauruplase, (Prourolinase, single chain urokinase), and aminocaproic acid (e.g., AMICAR™). In a specific embodiment, compositions of the invention are administered in combination with tissue plasminogen activator and aspirin.

[0836] In another embodiment, the Therapeutics of the invention are administered in combination with antiplatelet drugs. Antiplatelet drugs that may be administered with the compositions of the invention include, but are not limited to, aspirin, dipyridamole (e.g., PERSANTINE™), and ticlopidine (e.g., TICLID™).

[0837] In specific embodiments, the use of anti-coagulants, thrombolytic and/or antiplatelet drugs in combination with Therapeutics of the invention is contemplated for the detection, prevention, diagnosis, prognostication, treatment, and/or amelioration of thrombosis, arterial thrombosis, venous thrombosis, thromboembolism, pulmonary embolism, atherosclerosis, myocardial infarction, transient ischemic attack, unstable angina. In specific embodiments, the use of anticoagulants, thrombolytic drugs and/or antiplatelet drugs in combination with Therapeutics of the invention is contemplated for the prevention of occulsion of saphenous grafts, for reducing the risk of periprocedural thrombosis as might accompany angioplasty procedures, for reducing the risk of stroke in patients with atrial fibrillation including nonrheumatic atrial fibrillation, for reducing the risk of embolism associated with mechanical heart valves and or mitral valves disease. Other uses for the therapeutics of the invention, alone or in combination with antiplatelet, anticoagulant, and/or thrombolytic drugs, include, but are not limited to, the prevention of occlusions in extracorporeal devices (e.g., intravascular canulas, vascular access shunts in hemodialysis patients, hemodialysis machines, and cardiopulmonary bypass machines).

[0838] In certain embodiments, Therapeutics of the invention are administered in combination with antiretroviral agents, nucleoside/nucleotide reverse transcriptase inhibitors (NRTIs), non-nucleoside reverse transcriptase inhibitors (NNRTIs), and/or protease inhibitors (PIs). NRTIs that may be administered in combination with the Therapeutics of the invention, include, but are not limited to, RETROVIR™ (zidovudine/AZT), VIDEX™ (didanosine/ddI), HIVID™ (zalcitabine/ddC), ZERIT™ (stavudine/d4T), EPIVIR™ (lamivudine/3TC), and COMBIVIR™ (zidovudine/lamivudine). NNRTIs that may be administered in combination with the Therapeutics of the invention, include, but are not limited to, VIRAMUNE™ (nevirapine), RESCRIPTOR™ (delavirdine), and SUSTIVA™ (efavirenz). Protease inhibitors that may be administered in combination with the Therapeutics of the invention, include, but are not limited to, CRIXIVAN™ (indinavir), NORVIR™ (ritonavir), INVIRASE™ (saquinavir), and VIRACEPT™ (nelfinavir). In a specific embodiment, antiretroviral agents, nucleoside reverse transcriptase inhibitors, non-nucleoside reverse transcriptase inhibitors, and/or protease inhibitors may be used in any combination with Therapeutics of the invention to treat AIDS and/or to prevent or treat HIV infection.

[0839] Additional NRTIs include LODENOSINE™ (F-ddA; an acid-stable adenosine NRTI; Triangle/Abbott; COVIRACIL™ (emtricitabine/FTC; structurally related to lamivudine (3TC) but with 3- to 10-fold greater activity in vitro; Triangle/Abbott); dOTC (BCH-10652, also structurally related to lamivudine but retains activity against a substantial proportion of lamivudine-resistant isolates; Biochem Pharma); Adefovir (refused approval for anti-HIV therapy by FDA; Gilead Sciences); PREVEON® (Adefovir Dipivoxil, the active prodrug of adefovir; its active form is PMEA-pp); TENOFOVIR™ (bis-POC PMPA, a PMPA prodrug; Gilead); DAPD/DXG (active metabolite of DAPD; Triangle/Abbott); D-D4FC (related to 3TC, with activity against AZT/3TC-resistant virus); GW420867X (Glaxo Wellcome); ZIAGEN™ (abacavir/159U89; Glaxo Wellcome Inc.); CS-87 (3′azido-2′,3′-dideoxyuridine; WO 99/66936); and S-acyl-2-thioethyl (SATE)-bearing prodrug forms of β-L-FD4C and β-L-FddC (WO 98/17281).

[0840] Additional NNRTIs include COACTINON™ (Emivirine/MKC442, potent NNRTI of the HEPT class; Triangle/Abbott); CAPRAVIRINE™ (AG-1549/S-1153, a next generation NNRTI with activity against viruses containing the K103N mutation; Agouron); PNU-142721 (has 20- to 50-fold greater activity than its predecessor delavirdine and is active against K103N mutants; Pharmacia & Upjohn); DPC-961 and DPC-963 (second-generation derivatives of efavirenz, designed to be active against viruses with the K103N mutation; DuPont); GW-420867X (has 25-fold greater activity than HBY097 and is active against K103N mutants; Glaxo Wellcome); CALANOLIDE A (naturally occurring agent from the latex tree; active against viruses containing either or both the Y181C and K103N mutations); and Propolis (WO 99/49830).

[0841] Additional protease inhibitors include LOPINAVIR™ (ABT378/r; Abbott Laboratories); BMS-232632 (an azapeptide; Bristol-Myres Squibb); TIPRANAVIR™ (PNU-140690, a non-peptic dihydropyrone; Pharmacia & Upjohn); PD-178390 (a nonpeptidic dihydropyrone; Parke-Davis); BMS 232632 (an azapeptide; Bristol-Myers Squibb); L-756,423 (an indinavir analog; Merck); DMP-450 (a cyclic urea compound; Avid & DuPont); AG-1776 (a peptidomimetic with in vitro activity against protease inhibitor-resistant viruses; Agouron); VX-175/GW-433908 (phosphate prodrug of amprenavir; Vertex & Glaxo Welcome); CGP61755 (Ciba); and AGENERASE™ (amprenavir; Glaxo Wellcome Inc.).

[0842] Additional antiretroviral agents include fusion inhibitors/gp41 binders. Fusion inhibitors/gp41 binders include T-20 (a peptide from residues 643-678 of the HIV gp41 transmembrane protein ectodomain which binds to gp41 in=its resting state and prevents transformation to the fusogenic state; Trimeris) and T-1249 (a second-generation fusion inhibitor; Trimeris).

[0843] Additional antiretroviral agents include fusion inhibitors/chemokine receptor antagonists. Fusion inhibitors/chemokine receptor antagonists include CXCR4 antagonists such as AMD 3100 (a bicyclam), SDF-1 and its analogs, and ALX40-4C (a cationic peptide), T22 (an 18 aniino acid peptide; Trimeris) and the T22 analogs T134 and T140; CCR5 antagonists such as RANTES (9-68), AOP-RANTES, NNY-RANTES, and TAK-779; and CCR5/CXCR4 antagonists such as NSC 651016 (a distamycin analog). Also included are CCR2B, CCR3, and CCR6 antagonists. Chemokine recpetor agonists such as RANTES, SDF-1, MIP-1α, MIP-1β, etc., may also inhibit fusion.

[0844] Additional antiretroviral agents include integrase inhibitors. Integrase inhibitors include dicaffeoylquinic (DFQA) acids; L-chicoric acid (a dicaffeoyltartaric (DCTA) acid); quinalizarin (QLC) and related anthraquinones; ZINTEVIR™ (AR 177, an oligonucleotide that probably acts at cell surface rather than being a true integrase inhibitor; Arondex); and naphthols such as those disclosed in WO 98/50347.

[0845] Additional antiretroviral agents include hydroxyurea-like compounds such as BCX-34 (a purine nucleoside phosphorylase inhibitor; Biocryst); ribonucleotide reductase inhibitors such as DIDOX™ (Molecules for Health); inosine monophosphate dehydrogenase (IMPDH) inhibitors such as VX-497 (Vertex); and mycopholic acids such as CellCept (mycophenolate mofetil; Roche).

[0846] Additional antiretroviral agents include inhibitors of viral integrase, inhibitors of viral genome nuclear translocation such as arylene bis(methylketone) compounds; inhibitors of HIV entry such as AOP-RANTES, NNY-RANES, RANTES-IgG fusion protein, soluble complexes of RANTES and glycosaminoglycans (GAG), and AMD-3100; nucleocapsid zinc finger inhibitors such as dithiane compounds; targets of HIV Tat and Rev; and pharmacoenhancers such as ABT-378.

[0847] Other antiretroviral therapies and adjunct therapies include cytokines and lymphokines such as MIP-1α, MIP-1β, SDF-1α, IL-2, PROLEUKIN™ (aldesleukin/L2-7001; Chiron), IL-4, IL-10, IL-12, and IL-13; interferons such as IFN-α2a; antagonists of TNFs, NFκB, GM-CSF, M-CSF, and IL-10; agents that modulate immune activation such as cyclosporin and prednisone; vaccines such as Remune™ (HIV Immunogen), APL 400-003 (Apollon), recombinant gp120 and fragments, bivalent (B/E) recombinant envelope glycoprotein, rgp120CM235, MN rgp120, SF-2 rgp120, gp120/soluble CD4 complex, Delta JR-FL protein, branched synthetic peptide derived from discontinuous gp120 C3/C4 domain, fusion-competent immunogens, and Gag, Pol, Nef, and Tat vaccines; gene-based therapies such as genetic suppressor elements (GSEs; WO 98/54366), and intrakines (genetically modified CC chemokines targetted to the ER to block surface expression of newly synthesized CCR5 (Yang et al., PNAS 94:11567-72 (1997); Chen et al., Nat. Med. 3:1110-16 (1997)); antibodies such as the anti-CXCR4 antibody 12G5, the anti-CCR5 antibodies 2D7, 5C7, PA8, PA9, PA10, PA11, PA12, and PA14, the anti-CD4 antibodies Q4120 and RPA-T4, the anti-CCR3 antibody 7B11, the anti-gp120 antibodies 17b, 48d, 447-52D, 257D, 268-D and 50.1, anti-Tat antibodies, anti-TNF-α antibodies, and monoclonal antibody 33A; aryl hydrocarbon (AH) receptor agonists and antagonists such as TCDD, 3,3′,4,4′,5-pentachlorobiphenyl, 3,3′,4,4′-tetrachlorobiphenyl, and α-naphthoflavone (WO 98/30213); and antioxidants such as γ-L-glutamyl-L-cysteine ethyl ester (γ-GCE; WO 99/56764).

[0848] In a further embodiment, the Therapeutics of the invention are administered in combination with an antiviral agent. Antiviral agents that may be administered with the Therapeutics of the invention include, but are not limited to, acyclovir, ribavirin, amantadine, and remantidine.

[0849] In other embodiments, Therapeutics of the invention may be administered in combination with anti-opportunistic infection agents. Anti-opportunistic agents that may be administered in combination with the Therapeutics of the invention, include, but are not limited to, TRIMETHOPRIM-SULFAMETHOXAZOLE™, DAPSONE™, PENTAMIDINE™, ATOVAQUONE™, ISONIAZID™, RIFAMPIN™, PYRAZINAMIDE™, ETHAMBUTOL™, RIFABUTIN™, CLARITHROMYCIN™, AZITHROMYCIN™, GANCICLOVIR™, FOSCARNET™, CIDOFOVIR™, FLUCONAZOLE™, ITRACONAZOLE™, KETOCONAZOLE™, ACYCLOVIR™, FAMCICOLVIR™, PYRIMETHAMINE™, LEUCOVORIN™, NEUPOGEN™ (filgrastim/G-CSF), and LEUKINE™ (sargramostim/GM-CSF). In a specific embodiment, Therapeutics of the invention are used in any combination with TRIMETHOPRIM-SULFAMETHOXAZOLE™, DAPSONE™, PENTAMIDINE™, and/or ATOVAQUONE™ to prophylactically treat or prevent an opportunistic Pneumocystis carinii pneumonia infection. In another specific embodiment, Therapeutics of the invention are used in any combination with ISONIAZID™, RIFAMPIN™, PYRAZINAMIDE™, and/or ETHAMBUTOL™ to prophylactically treat or prevent an opportunistic Mycobacterium avium complex infection. In another specific embodiment, Therapeutics of the invention are used in any combination with RIFABUTIN™, CLARITHROMYCIN™, and/or AZITHROMYCIN™ to prophylactically treat or prevent an opportunistic Mycobacterium tuberculosis infection. In another specific embodiment, Therapeutics of the invention are used in any combination with GANCICLOVIR™, FOSCARNET™, and/or CIDOFOVIR^{SM} to prophylactically treat or prevent an opportunistic cytomegalovirus infection. In another specific embodiment, Therapeutics of the invention are used in any combination with FLUCONAZOLE™, ITRACONAZOLE™, and/or KETOCONAZOLE™ to prophylactically treat or prevent an opportunistic fungal infection. In another specific embodiment, Therapeutics of the invention are used in any combination with ACYCLOVIR™ and/or FAMCICOLVIR™ to prophylactically treat or prevent an opportunistic herpes simplex virus type I and/or type II infection. In another specific embodiment, Therapeutics of the invention are used in any combination with PYRIMETHAMINE™ and/or LEUCOVORIN™ to prophylactically treat or prevent an opportunistic Toxoplasma gondii infection. In another specific embodiment, Therapeutics of the invention are used in any combination with LEUCOVORIN™ and/or NEUPOGEN™ to prophylactically treat or prevent an opportunistic bacterial infection.

[0850] In a further embodiment, the Therapeutics of the invention are administered in combination with an antibiotic agent. Antibiotic agents that may be administered with the Therapeutics of the invention include, but are not limited to, amoxicillin, beta-lactamases, aminoglycosides, beta-lactam (glycopeptide), beta-lactamases, Clindamycin, chloramphenicol, cephalosporins, ciprofloxacin, erythromycin, fluoroquinolones, macrolides, metronidazole, penicillins, quinolones, rapamycin, rifampin, streptomycin, sulfonamide, tetracyclines, trimethoprim, trimethoprim-sulfamethoxazole, and vancomycin.

[0851] In other embodiments, the Therapeutics of the invention are administered in combination with immunestimulants. Immunostimulants that may be administered in combination with the Therapeutics of the invention include, but are not limited to, levamisole (e.g., ERGAMISOL™), isoprinosine (e.g. INOSIPLEX™), interferons (e.g. interferon alpha), and interleukins (e.g., IL-2).

[0852] In other embodiments, Therapeutics of the invention are administered in combination with immunosuppressive agents. Immunosuppressive agents that may be administered in combination with the Therapeutics of the invention include, but are not limited to, steroids, cyclosporine, cyclosporine analogs, cyclophosphamide methylprednisone, prednisone, azathioprine, FK-506, 15-deoxyspergualin, and other immunosuppressive agents that act by suppressing the function of responding T cells. Other immunosuppressive agents that may be administered in combination with the Therapeutics of the invention include, but are not limited to, prednisolone, methotrexate, thalidomide, methoxsalen, rapamycin, leflunomide, mizoribine (BREDININ™), brequinar, deoxyspergualin, and azaspirane (SKF 105685), ORTHOCLONE OKT® 3 (muromonab-CD3), SANDIMMUNE™, NEORAL™, SANGDYA™ (cyclosporine), PROGRAF® (FK506, tacrolimus), CELLCEPT® (mycophenolate motefil, of which the active metabolite is mycophenolic acid), IMURAN™ (azathioprine), glucocorticosteroids, adrenocortical steroids such as DELTASONE™ (prednisone) and HYDELTRASOL™ (prednisolone), FOLEX™ and MEXATE™ (methotrxate), OXSORALEN-ULTRA™ (methoxsalen) and RAPAMUNE™ (sirolimus). In a specific embodiment, immunosuppressants may be used to prevent rejection of organ or bone marrow transplantation.

[0853] In an additional embodiment, Therapeutics of the invention are administered alone or in combination with one or more intravenous immune globulin preparations. Intravenous immune globulin preparations that may be administered with the Therapeutics of the invention include, but not limited to, GAMMAR™, IVEEGAM™, SANDOGLOBULIN™, GAMMAGARD S/D™, ATGAM™ (antithymocyte glubulin), and GAMIMUNE™. In a specific embodiment, Therapeutics of the invention are administered in combination with intravenous immune globulin preparations in transplantation therapy (e.g., bone marrow transplant).

[0854] In certain embodiments, the Therapeutics of the invention are administered alone or in combination with an anti-inflammatory agent. Anti-inflammatory agents that may be administered with the Therapeutics of the invention include; but are not limited to, corticosteroids (e.g. betamethasone, budesonide, cortisone, dexamethasone, hydrocortisone, methylprednisolone, prednisolone, prednisone, and triamcinolone), nonsteroidal anti-inflammatory drugs (e.g., diclofenac, diflunisal, etodolac, fenoprofen, floctafenine, flurbiprofen, ibuprofen, indomethacin, ketoprofen, meclofenamate, mefenamic acid, meloxicam, nabumetone, naproxen, oxaprozin, phenylbutazone, piroxicam, sulindac, tenoxicam, tiaprofenic acid, and tolmetin.), as well as antihistamines, amninoarylcarboxylic acid derivatives, arylacetic acid derivatives, arylbutyric acid derivatives, arylcarboxylic acids, arylpropionic acid derivatives, pyrazoles, pyrazolones, salicylic acid derivatives, thiazinecarboxamides, e-acetamidocaproic acid, S-adenosylmethionine, 3-amino-4-hydroxybutyric acid, amixetrine, bendazac, benzydamnine, bucolome, difenpiramide, ditazol, emorfazone, guaiazulene, nabumetone, nimesulide, orgotein, oxaceprol, paranyline, perisoxal, pifoxime, proquazone, proxazole, and tenidap.

[0855] In an additional embodiment, the compositions of the invention are administered alone or in combination with an anti-angiogenic agent. Anti-angiogenic agents that may be administered with the compositions of the invention include, but are not limited to, Angiostatin (Entremed, Rockville, Md.), Troponin-1 (Boston Life Sciences, Boston, Mass.), anti-Invasive Factor, retinoic acid and derivatives thereof, paclitaxel (Taxol), Suramin, Tissue Inhibitor of Metalloproteinase-1, Tissue Inhibitor of Metalloproteinase-2, VEGI, Plasminogen Activator Inhibitor-1, Plasminogen Activator Inhibitor-2, and various forms of the lighter “d group” transition metals.

[0856] Lighter “d group” transition metals include, for example, vanadium, molybdenum, tungsten, titanium, niobium, and tantalum species. Such transition metal species may form transition metal complexes. Suitable complexes of the above-mentioned transition metal species include oxo transition metal complexes.

[0857] Representative examples of vanadium complexes include oxo vanadium complexes such as vanadate and vanadyl complexes. Suitable vanadate complexes include metavanadate and orthovanadate complexes such as, for example, ammonium metavanadate, sodium metavanadate, and sodium orthovanadate. Suitable vanadyl complexes include, for example, vanadyl acetylacetonate and vanadyl sulfate including vanadyl sulfate hydrates such as vanadyl sulfate mono- and trihydrates.

[0858] Representative examples of tungsten and molybdenum complexes also include oxo complexes. Suitable oxo tungsten complexes include tungstate and tungsten oxide complexes. Suitable tungstate complexes include ammonium tungstate, calcium tungstate, sodium tungstate dihydrate, and tungstic acid. Suitable tungsten oxides include tungsten (IV) oxide and tungsten (VI) oxide. Suitable oxo molybdenum complexes include molybdate, molybdenum oxide, and molybdenyl complexes. Suitable molybdate complexes include ammonium molybdate and its hydrates, sodium molybdate and its hydrates, and potassium molybdate and its hydrates. Suitable molybdenum oxides include molybdenum (VI) oxide, molybdenum (VI) oxide, and molybdic acid. Suitable molybdenyl complexes include, for example, molybdenyl acetylacetonate. Other suitable tungsten and molybdenum complexes include hydroxo derivatives derived from, for example, glycerol, tartaric acid, and sugars.

[0859] A wide variety of other anti-angiogenic factors may also be utilized within the context of the present invention. Representative examples include, but are not limited to, platelet factor 4; protamine sulphate; sulphated chitin derivatives (prepared from queen crab shells), (Murata et al., Cancer Res. 51:22-26, (1991)); Sulphated Polysaccharide Peptidoglycan Complex (SP-PG) (the function of this compound may be enhanced by the presence of steroids such as estrogen, and tamoxifen citrate); Staurosporine; modulators of matrix metabolism, including for example, proline analogs, cishydroxyproline, d,L-3,4-dehydroproline, Thiaproline, alpha,alpha-dipyridyl, aminopropionitrile fumarate; ⁴-propyl-5-(4-pyridinyl)-2(3H)-oxazolone; Methotrexate; Mitoxantrone; Heparin; Interferons; 2 Macroglobulin-serum; ChIMP-3 (Pavloff et al., J. Bio. Chem. 267:17321-17326, (1992)); Chymostatin (Tomkinson et al., Biochem J. 286:475-480, (1992)); Cyclodextrin Tetradecasulfate; Eponemycin; Camptothecin; Fumagillin (Ingber et al., Nature 348:555-557, (1990)); Gold Sodium Thiomalate (“GST”; Matsubara and Ziff, J. Clin. Invest. 79:1440-1446, (1987)); anticollagenase-serum; alpha2-antiplasmin (Holmes et al., J. Biol. Chem. 262(4):1659-1664, (1987)); Bisantrene (National Cancer Institute); Lobenzarit disodium (N-(2)-carboxyphenyl-4-chloroanthronilic acid disodium or “CCA”;. (Takeuchi et al., Agents Actions 36:312-316, (1992)); and metalloproteinase inhibitors such as BB94.

[0860] Additional anti-angiogenic factors that may also be utilized within the context of the present invention include Thalidomide, (Celgene, Warren, N.J.); Angiostatic steroid; AGM-1470 (H. Brem and J. Folkman J Pediatr. Surg. 28:445-51 (1993)); an integrin alpha v beta 3 antagonist (C. Storgard et al., J Clin. Invest. 103:47-54 (1999)); carboxynaminolmidazole; Carboxyamidotriazole (CAI) (National Cancer Institute, Bethesda, Md.); Conbretastatin A-4 (CA4P) (OXiGENE, Boston, Mass.); Squalamine (Magainin Pharmaceuticals, Plymouth Meeting, Pa.); TNP-470, (Tap Pharmaceuticals, Deerfield, Ill.); ZD-0101 AstraZeneca (London, UK); APRA (CT2584); Benefin, Byrostatin-1 (SC339555); CGP-41251 (PKC 412); CM101; Dexrazoxane (ICRF187); DMXAA; Endostatin; Flavopridiol; Genestein; GTE; ImmTher; Iressa (ZD1839); Octreotide (Somatostatin); Panretin; Penacillamine; Photopoint; PI-88; Prinomastat (AG-3340) Purlytin; Suradista (FCE26644); Tamoxifen (Nolvadex); Tazarotene; Tetrathiomolybdate; Xeloda (Capecitabine); and 5-Fluorouracil.

[0861] Anti-angiogenic agents that may be administered in combination with the compounds of the invention may work through a variety of mechanisms including, but not limited to, inhibiting proteolysis of the extracellular matrix, blocking the function of endothelial cell-extracellular matrix adhesion molecules, by antagonizing the function of angiogenesis inducers such as growth factors, and inhibiting integrin receptors expressed on proliferating endothelial cells. Examples of anti-angiogenic inhibitors that interfere with extracellular matrix proteolysis and which may be administered in combination with the compositons of the invention include, but are not lnited to, AG-3340 (Agouron, La Jolla, Calif.), BAY-12-9566 (Bayer, West Haven, Conn.), BMS-275291 (Bristol Myers Squibb, Princeton, N.J.), CGS-27032A (Novartis, East Hanover, N.J.), Marimastat (British Biotech, Oxford, UK), and Metastat (Aeterna, St-Foy, Quebec). Examples of anti-angiogenic inhibitors that act by blocking the function of endothelial cell-extracellular matrix adhesion molecules and which may be administered in combination with the compositons of the invention include, but are not lmited to, EMD-121974 (Merck KcgaA Darmstadt, Germany) and Vitaxin (Ixsys, La Jolla, Calif./Medimmune, Gaithersburg, Md.). Examples of anti-angiogenic agents that act by directly antagonizing or inhibiting angiogenesis inducers and which may be administered in combination with the compositons of the invention include, but are not lmited to, Angiozyme (Ribozyme, Boulder, Colo.), Anti-VEGF antibody (Genentech, S. San Francisco, Calif.), PTK-787/ZK-225846 (Novartis, Basel, Switzerland), SU-101 (Sugen, S. San Francisco, Calif.), SU-5416 (Sugen/Pharmacia Upjohn, Bridgewater, N.J.), and SU-6668 (Sugen). Other anti-angiogenic agents act to indirectly inhibit angiogenesis. Examples of indirect inhibitors of angiogenesis which may be administered in combination with the compositons of the invention include, but are not limited to, IM-862 (Cytran, Kirkland, Wash.), Interferon-alpha, IL-12 (Roche, Nutley, N.J.), and Pentosan polysulfate (Georgetown University, Washington, D.C.).

[0862] In particular embodiments, the use of compositions of the invention in combination with anti-angiogenic agents is contemplated for the treatment, prevention, and/or amelioration of an autoimmune disease, such as for example, an autoimmune disease described herein.

[0863] In a particular embodiment, the use of compositions of the invention in combination with anti-angiogenic agents is contemplated for the treatment, prevention, and/or amelioration of arthritis. In a more particular embodiment, the use of compositions of the invention in combination with anti-angiogenic agents is contemplated for the treatment, prevention, and/or amelioration of rheumatoid arthritis.

[0864] In another embodiment, the polynucleotides encoding a polypeptide of the present invention are administered in combination with an angiogenic protein, or polynucleotides encoding an angiogenic protein. Examples of angiogenic proteins that may be administered with the compositions of the invention include, but are not limited to, acidic and basic fibroblast growth factors, VEGF-1, VEGF-2, VEGF-3, epidermal growth factor alpha and beta, platelet-derived endothelial cell growth factor, platelet-derived growth factor, tumor necrosis factor alpha, hepatocyte growth factor, insulin-like growth factor, colony stimulating factor, macrophage colony stimulating factor, granulocyte/macrophage colony stimulating factor, and nitric oxide synthase.

[0865] In additional embodiments, compositions of the invention are administered in combination with a chemotherapeutic agent. Chemotherapeutic agents that may be administered with the Therapeutics of the invention include, but are not limited to alkylating agents such as nitrogen mustards (for example, Mechlorethamine, cyclophospharnide, Cyclophosphamide Ifosfamide, Melphalan (L-sarcolysin), and Chlorambucil), ethylenimines and methylmelamines (for example, Hexamethylmelamine and Thiotepa), alkyl sulfonates (for example, Busulfan), nitrosoureas (for example, Carmustine (BCNU), Lomustine (CCNU), Semustine (methyl-CCNU), and Streptozocin (streptozotocin)), triazenes (for example, Dacarbazine (DTIC; dimethyltriazenoimidazolecarboxamide)), folic acid analogs (for example, Methotrexate (amethopterin)), pyrimidine analogs (for example, Fluorouacil (5-fluorouracil; 5-FU), Floxuridine (fluorodeoxyuridine; FudR), and Cytarabine (cytosine arabinoside)), purine analogs and related inhibitors (for example, Mercaptopurine (6-mercaptopurine; 6-MP), Thioguanine (6-thioguanine; TG), and Pentostatin (2′-deoxycoformycin)), vinca alkaloids (for example, Vinblastine (VLB, vinblastine sulfate)) and Vincristine (vincristine sulfate)), epipodophyllotoxins (for example, Etoposide and Teniposide), antibiotics (for example, Dactinomycin (actinomycin D), Daunorubicin (daunomycin; rubidomycin), Doxorubicin, Bleomycin, Plicamycin (mithramycin), and Mitomycin (mitomycin C), enzymes (for example, L-Asparaginase), biological response modifiers (for example, Interferon-alpha and interferon-alpha-2b), platinum coordination compounds (for example, Cisplatin (cis-DDP) and Carboplatin), antbracenedione (Mitoxantrone), substituted ureas (for example, Hydroxyurea), methylhydrazine derivatives (for example, Procarbazine (N-methylhydrazine; MEI, adrenocorticosteroids (for example, Prednisone), progestins (for example, Hydroxyprogesterone caproate, Medroxyprogesterone, Medroxyprogesterone acetate, and Megestrol acetate), estrogens (for example, Diethylstilbestrol (DES), Diethylstilbestrol diphosphate, Estradiol, and Ethinyl estradiol), antiestrogens (for example, Tamoxifen), androgens (Testosterone proprionate, and Fluoxymesterone), antiandrogens (for example, Flutamide), gonadotropin-releasing horomone analogs (for example, Leuprolide), other hormones and hormone analogs (for example, methyltestosterone, estramustine, estramustine phosphate sodium, chlorotrianisene, and testolactone), and others (for example, dicarbazine, glutamic acid, and mitotane).

[0866] In one embodiment, the compositions of the invention are administered in combination with one or more of the following drugs: infliximab (also known as Remicade™ Centocor, Inc.), Trocade (Roche, RO-32-3555), Leflunomide (also known as Arava™ from Hoechst Marion Roussel), Kineret™ (an IL-1 Receptor antagonist also known as Anakinra from Amgen, Inc.)

[0867] In a specific embodiment, compositions of the invention are administered in combination with CHOP (cyclophosphamide, doxorubicin, vincristine, and prednisone) or combination of one or more of the components of CHOP. In one embodiment, the compositions of the invention are administered in combination with anti-CD20 antibodies, human monoclonal anti-CD20 antibodies. In another embodiment, the compositions of the invention are administered in combination with anti-CD20 antibodies and CHOP, or anti-CD20 antibodies and any combination of one or more of the components of CHOP, particularly cyclophosphamide and/or prednisone. In a specific embodiment, compositions of the invention are administered in combination with Rituximab. In a further embodiment, compositions of the invention are administered with Rituximab and CHOP, or Rituximab and any combination of one or more of the components of CHOP, particularly cyclophosphamide and/or prednisone. In a specific embodiment, compositions of the invention are administered in combination with tositumomab. In a further embodiment; compositions of the invention are administered with tositumomab and CHOP, or tositumomab and any combination of one or more of the components of CHOP, particularly cyclophosphamide and/or prednisone. The anti-CD20 antibodies may optionally be associated with radioisotopes, toxins or cytotoxic prodrugs.

[0868] In another specific embodiment, the compositions of the invention are administered in combination Zevalin™. In a further embodiment, compositions of the invention are administered with Zevalin™ and CHOP, or Zevalin™ and any combination of one or more of the components of CHOP, particularly cyclophosphamide and/or prednisone. Zevalin™ May be associated with one or more radisotopes. Particularly preferred isotopes are ⁹⁰Y and ¹¹¹In.

[0869] In an additional embodiment, the Therapeutics of the invention are administered in combination with cytokines. Cytokines that may be administered with the Therapeutics of the invention include, but are not limited to, IL2, IL3, IL4, IL5, IL6, IL7, L10, IL12, IL13, IL15, anti-CD40, CD40L, IFN-gamma and TNF-alpha. In another embodiment, Therapeutics of the invention may be administered with any interleukin, including, but not limited to, IL-1alpha, IL-1beta, IL-2, IL-3, IL-4, IL-5, IL-6, IL-7, IL-8, IL-9, IL-10, IL-11, IL-12, IL-13, IL-14, IL-15, IL-16, IL-17, IL-18, IL-19, IL-20, and IL-21.

[0870] In one embodiment, the Therapeutics of the invention are administered in combination with members of the TNF family. TNF, TNF-related or TNF-like molecules that may be administered with the Therapeutics of the invention include, but are not limited to, soluble forms of TNF-alpha, lymphotoxin-alpha (LT-alpha, also known as TNF-beta), LT-beta (found in complex heterotrimer LT-alpha2-beta), OPGL, FasL, CD27L, CD30L, CD40L, 4-1BBL, DcR3, OX40L, TNF-gamma (International Publication No. WO 96/14328), AIM-I (International Publication No. WO 97/33899), endokine-alpha (International Publication No. WO 98/07880), OPG, and neutrokine-alpha (International Publication No. WO 98/18921, OX40, and nerve growth factor (NGF), and soluble forms of Fas, CD30, CD27, CD40 and 4-IBB, TR2 (International Publication No. WO 96/34095), DR3 (International Publication No. WO 97/33904), DR4 (International Publication No. WO 98/32856), TR5 (International Publication No. WO 98/30693), TRANK, TR9 (International Publication No. WO 98/56892), TR10 (International Publication No. WO 98/54202), 312C2 (International Publication No. WO 98/06842), and TR12, and soluble forms CD154, CD70, and CD153.

[0871] In an additional embodiment, the Therapeutics of the invention are administered in combination with angiogenic proteins. Angiogenic proteins that may be administered with the Therapeutics of the invention include, but are not limited to, Glioma Derived Growth Factor (GDGF), as disclosed in European Patent Number EP-399816; Platelet Derived Growth Factor-A (PDGF-A), as disclosed in European Patent Number EP-682110; Platelet Derived Growth Factor-B (PDGF-B), as disclosed in European Patent Number EP-282317; Placental Growth Factor (PIGF), as disclosed in International Publication Number WO 92/06194; Placental Growth Factor-2 (PIGF-2), as disclosed in Hauser et al., Growth Factors, 4:259-268 (1993); Vascular Endothelial Growth Factor (VEGF), as disclosed in International Publication Number WO 90/13649; Vascular Endothelial Growth Factor-A (VEGF-A), as disclosed in European Patent Number EP-506477; Vascular Endothelial Growth Factor-2 (VEGF-2), as disclosed in International Publication Number WO 96/39515; Vascular Endothelial Growth Factor B (VEGF-3); Vascular Endothelial Growth Factor B-186 (VEGF-B186), as disclosed in International Publication Number WO 96/26736; Vascular Endothelial Growth Factor-D (VEGF-D), as disclosed in International Publication Number WO 98/02543; Vascular Endothelial Growth Factor-D (VEGF-D), as disclosed in International Publication Number WO 98/07832; and Vascular Endothelial Growth Factor-E (VEGF-E), as disclosed in German Patent Number DE19639601. The above mentioned references are herein incorporated by reference in their entireties.

[0872] In an additional embodiment, the Therapeutics of the invention are administered in combination with Fibroblast Growth Factors. Fibroblast Growth Factors that may be administered with the Therapeutics of the invention include, but are not limited to, FGF-1, FGF-2, FGF-3, FGF-4, FGF-5, FGF-6, FGF-7, FGF-8, FGF-9, FGF-10, FGF-1 1, FGF-12, FGF-13, FGF-14, and FGF-15.

[0873] In an additional embodiment, the Therapeutics of the invention are administered in combination with hematopoietic growth factors. Hematopoietic growth factors that may be administered with the Therapeutics of the invention include, but are not limited to, granulocyte macrophage colony stimulating factor (GM-CSF) (sargramostim, LEUKINE™, PROKINE™), granulocyte colony stimulating factor (G-CSF) (filgrastim, NEUPOGEN™), macrophage colony stimulating factor (M-CSF, CSF-1) erythropoietin (epoetin alfa, EPOGEN™, PROCRIT™), stem cell factor (SCF, c-kit ligand, steel factor), megakaryocyte colony stimulating factor, PIXY321 (a GMCSF/IL-3 fusion protein), interleukins, especially any one or more of IL-1 through IL-12, interferon-gamma, or thrombopoietin.

[0874] In certain embodiments, Therapeutics of the present invention are administered in combination with adrenergic blockers, such as, for example, acebutolol, atenolol, betaxolol, bisoprolol, carteolol, labetalol, metoprolol, nadolol, oxprenolol, penbutolol, pindolol, propranolol, sotalol, and timolol.

[0875] In another embodiment, the Therapeutics of the invention are administered in combination with an antiarrhythmic drug (e.g., adenosine, amidoarone, bretylium, digitalis, digoxin, digitoxin, diliazem, disopyramide, esmolol, flecainide, lidocaine, mexiletine, moricizine, phenytoin, procainamide, N-acetyl procainamide, propafenone, propranolol, quinidine, sotalol, tocainide, and verapamil).

[0876] In another embodiment, the Therapeutics of the invention are administered in combination with diuretic agents, such as carbonic anhydrase-inhibiting agents (e.g., acetazolamide, dichlorphenamide, and methazolamide), osmotic diuretics (e.g., glycerin, isosorbide, mannitol, and urea), diuretics that inhibit Na⁺—K⁺-2Cl⁻ symport (e.g., furosemide, bumetanide, azosemide, piretanide, tripamide, ethacrynic acid, muzolimine, and torsemide), thiazide and thiazide-like diuretics (e.g., bendroflumethiazide, benzthiazide, chlorothiazide, hydrochlorothiazide, hydroflumethiazide, methyclothiazide, polythiazide, trichormethiazide, chlorthalidone, indapamide, metolazone, and quinethazone), potassium sparing diuretics (e.g., amiloride and triamterene), and mineralcorticoid receptor antagonists (e.g., spironolactone, canrenone, and potassium canrenoate).

[0877] In one embodiment, the Therapeutics of the invention are administered in combination with treatments for endocrine and/or hormone imbalance disorders. Treatments for endocrine and/or hormone imbalance disorders include, but are not limited to, ¹²⁷I, radioactive isotopes of iodine such as ¹³¹I and ¹²³I; recombinant growth hormone, such as HUMATROPET™ (recombinant somatropin); growth hormone analogs such as PROTROPIN™ (somatrem); dopamine agonists such as PARLODEL™ (bromocriptine); somatostatin analogs such as SANDOSTATIN™ (octreotide); gonadotropin preparations such as PREGNYL™, A.P.L.™ and PROFASI™ (chorionic gonadotropin (CG)), PERGONAL™ (menotropins), and METRODIN™ (urofollitropin (uFSH)); synthetic human gonadotropin releasing hormone preparations such as FACTREL™ and LUTREPULSE™ (gonadorelin hydrochloride); synthetic gonadotropin agonists such as LUPRON™ (leuprolide acetate), SUPPRELIN™ (histrelin acetate), SYNAREL™ (nafarelin acetate), and ZOLADEX™ (goserelin acetate); synthetic preparations of thyrotropin-releasing hormone such as RELEFACT TRH™ and THYPINONE™ (protirelin); recombinant human TSH such as THYROGEN™; synthetic preparations of the sodium salts of the natural isomers of thyroid hormones such as L-T₄™, SYNTHROID™ and LEVOTHROID™ (levothyroxine sodium), L-T₃™, CYTOMEL™ and TRIOSTAT™ (liothyroine sodium), and THYROLAR™ (liotrix); antithyroid compounds such as 6-n-propylthiouracil (propylthiouracil), 1-methyl-2-mercaptoimidazole and TAPAZOLE™ (methimazole), NEO-MERCAZOLE™ (carbimazole); beta-adrenergic receptor antagonists such as propranolol and esmolol; Ca²⁺ channel blockers; dexamethasone and iodinated radiological contrast agents such as TELEPAQUE™ (iopanoic acid) and ORAGRAFIN™ (sodium ipodate).

[0878] Additional treatments for endocrine and/or hormone imbalance disorders include, but are not limited to, estrogens or congugated estrogens such as ESTRACE™ (estradiol), ESTINYL™ (ethinyl estradiol), PREMARIN™, ESTRATAB™, ORTHO-EST™, OGEN™ and estropipate (estrone), ESTROVIS™ (quinestrol), ESTRADERM™ (estradiol), DELESTROGEN™ and VALERGEN™ (estradiol valerate), DEPO-ESTRADIOL CYPIONATE™ and ESTROJECT LA™ (estradiol cypionate); antiestrogens such as NOLVADEX™ (tarnoxifen), SEROPHENE™ and CLOMID™ (clomiphene); progestins such as DURALUTIN™ (hydroxyprogesterone caproate), MPA™ and DEPO-PROVERA™ (medroxyprogesterone acetate), PROVERA™ and CYCRIN™ (MPA), MEGACE™ (megestrol acetate), NORLUTIN™ (norethindrone), and NORLUTATE™ and AYGESTIN™ (norethindrone acetate); progesterone implants such as NORPLANT SYSTEM™ (subdermal implants of norgestrel); antiprogestins such as RU 486™ (mifepristone); hormonal contraceptives such as ENOVID™ (norethynodrel plus mestranol), PROGESTASERT™ (intrauterine device that releases progesterone), LOESTRIN™, BREVICON™, MODICON™, GENORA™, NELONA™, NORINYL™, OVACON-35™ and OVACON-50™ (ethinyl estradiol/norethindrone), LEVLEN™, NORDETTE™, TRI-LEVLEN™ and TRIPHASEL-21™ (ethinyl estradiol/levonorgestrel) LO/OVRAL™ and OVRAL™ (ethinyl estradiol/norgestrel), DEMULEN™ (ethinyl estradiol/ethynodiol diacetate), NORINYL™, ORTHO-NOVUM™, NORETHIN™, GENORA™, and NELOVA™ (norethindrone/mestranol), DESOGEN™ and ORTHO-CEPT™ (ethinyl estradiol/desogestrel), ORTHO-CYCLEN™ and ORTHO-TRICYCLEN™ (ethinyl estradiol/norgestimate), MICRONOR™ and NOR-QD™ (norethindrone), and OVRETTE™ (norgestrel).

[0879] Additional treatments for endocrine and/or hormone imbalance disorders include, but are not limited to, testosterone esters such as methenolone acetate and testosterone undecanoate; parenteral and oral androgens such as TESTOJECT-50™ (testosterone), TESTEX™ (testosterone propionate), DELATESTRYL™ (testosterone enanthate), DEPO-TESTOSTERONE™ (testosterone cypionate), DANOCRINE™ (danazol), HALOTESTIN™ (fluoxymesterone), ORETON METHYL™, TESTRED™ and VIRILON™ (methyltestosterone), and OXANDRIN™ (oxandrolone); testosterone transdermal systems such as TESTODERM™; androgen receptor antagonist and 5-alpha-reductase inhibitors such as ANDROCUR™ (cyproterone acetate), EULEXIN™ (flutamide), and PROSCAR™ (finasteride); adrenocorticotropic hormone preparations such as CORTROSYN™ (cosyntropin); adrenocortical steroids and their synthetic analogs such as ACLOVATE™ (alclometasone dipropionate), CYCLOCORT™ (amcinonide), BECLOVENT™ and VANCERIL™ (beclomethasone dipropionate), CELESTONE™ (betamethasone), BENISONE™ and UTICORT™ (betamethasone benzoate), DIPROSONE™ (betamethasone dipropionate), CELESTONE PHOSPHATE™ (betamethasone sodium phosphate), CELESTONE SOLUSPAN™ (betamethasone sodiumn phosphate and acetate), BETA-VAL™ and VALISONE™ (betamethasone valerate), TEMOVATE™ (clobetasol propionate), CLODERM™ (clocortolone pivalate), CORTEF™ and HYDROCORTONE™ (cortisol (hydrocortisone)), HYDROCORTONE ACETATE™ (cortisol (hydrocortisone) acetate), LOCOID™ (cortisol (hydrocortisone) butyrate), HYDROCORTONE PHOSPHATE™ (cortisol (hydrocortisone) sodium phosphate), A-HYDROCORT™ and SOLU CORTEF™ (cortisol (hydrocortisone) sodium succinate), WESTCORT™ (cortisol (hydrocortisone) valerate), CORTISONE ACETATE™ (cortisone acetate), DESOWEN™ and TRIDESILON™ (desonide), TOPICORT™ (desoximetasone), DECADRON™ (dexamethasone), DECADRON LA™ (dexamethasone acetate), DECADRON PHOSPHATE™ and BEXADROL PHOSPHATE™ (dexamethasone sodium phosphate), FLORONE™ and MAXIFLOR™ (diflorasone diacetate), FLORINEF ACETATE™ (fludrocortisone acetate), AEROBID™ and NASALIDE™ (flunisolide), FLUONID™ and SYNALAR™ (fluocinolone acetonide), LIDEX™ (fluocinonide), FLUOR-OP™ and FML™ (fluorometholone), CORDRAN™ (flurandrenolide), HALOG™ (halcinonide), HMS LIZUIFILM™ (medrysone), MEDROL™ (methylprednisolone), DEPO-MEDROL™ and MEDROL ACETATE™ (methylprednisone acetate), A-METHAPRED™ and SOLUMEDROL™ (methylprednisolone sodium succinate), ELOCON™ (mometasone furoate), HALDRONE™ (paramethasone acetate), DELTA-CORTEF™ (prednisolone), ECONOPRED™ (prednisolone acetate), HYDELTRASOL™ (prednisolone sodium phosphate), HYDELTRA-T.B.A™ (prednisolone tebutate), DELTASONE™ (prednisone), ARISTOCORT™ and KENACORT™ (triamcinolone), KENALOG™ (triamcinolone acetonide), ARISTOCORT™ and KENACORT DIACETATE™ (triamcinolone diacetate), and ARISTOSPAN™ (triamcinolone hexacetonide); inhibitors of biosynthesis and action of adrenocortical steroids such as CYTADREN™ (aminoglutethimide), NIZORAL™ (ketoconazole), MODRASTANE™ (trilostane), and METOPIRONE™ (metyrapone); bovine, porcine or human insulin or mixtures thereof; insulin analogs; recombinant human insulin such as HUMULN™ and NOVOLIN™; oral hypoglycemic agents such as ORAMIDE™ and ORINASE™ (tolbutamide), DIABINESE™ (chlorpropamide), TOLAMIDE™ and TOLINASE™ (tolazamide), DYMELOR™ (acetohexamide), glibenclamide, MICRONASE™, DIBETA™ and GLYNASE™ (glyburide), GLUCOTROL™ (glipizide), and DIAMICRON™ (gliclazide), GLUCOPHAGE™ (metformin), ciglitazone, pioglitazone, and alpha-glucosidase inhibitors; bovine or porcine glucagon; somatostatins such as SANDOSTATIN™ (octreotide); and diazoxides such as PROGLYCEM™ (diazoxide).

[0880] In an additional embodiment, the Therapeutics of the invention are administered in combination with drugs effective in treating iron deficiency and hypochromic anemias, including but not limited to, ferrous sulfate (iron sulfate, FEOSOL™), ferrous fumarate (e.g., FEOSTAT™), ferrous gluconate (e.g., FERGON™), polysaccharide-iron complex (e.g., NIFEREX™), iron dextran injection (e.g., INFED™), cupric sulfate, pyroxidine, riboflavin, Vitamin B₁₂, cyancobalamin injection (e.g., REDISOL™, RUBRAMIN PC™), hydroxocobalarnin, folic acid (e.g., FOLVITE™), leucovorin (folinic acid, 5-CHOH4PteGlu, citrovorum factor) or WELLCOVORIN (Calcium salt of leucovorin), transferrin or ferritin.

[0881] In another embodiment, Therapeutics of the invention are administered in combination with vasodilating agents and/or calcium channel blocking agents. Vasodilating agents that may be administered with the Therapeutics of the invention include, but are not limited to, Angiotensin Converting Enzyme (ACE) inhibitors (e.g., papaverine, isoxsuprine, benazepril, captopril, cilazapril, enalapril, enalaprilat, fosinopril, lisinopril, moexipril, perindopril, quinapril, ramipril, spirapril, trandolapril, and nylidrin), and nitrates (e.g., isosorbide dinitrate, isosorbide mononitrate, and nitroglycerin). Examples of calcium channel blocking agents that may be administered in combination with the Therapeutics of the invention include, but are not limited to amlodipine, bepridil, diltiazem, felodipine, flunarizine, isradipine, nicardipine, nifedipine, nimodipine, and verapamil.

[0882] In certain embodiments, the Therapeutics of the invention are administered in combination with treatments for gastrointestinal disorders. Treatments for gastrointestinal disorders that may be administered with the Therapeutic of the invention include, but are not limited to, H₂ histamine receptor antagonists (e.g., TAGAMET™ (cimetidine), ZANTAC™ (ranitidine), PEPCID™ (famotidine), and AXID™ (nizatidine)); inhibitors of H⁺, K⁺ ATPase (e.g., PREVACID™ (lansoprazole) and PRILOSEC™ (omeprazole)); Bismuth compounds (e.g., PEPTO-BISMOL™ (bismuth subsalicylate) and DE-NOL™ (bismuth subcitrate)); various antacids; sucralfate; prostaglandin analogs (e.g. CYTOTEC™ (misoprostol)); muscarinic cholinergic antagonists; laxatives (e.g., surfactant laxatives, stimulant laxatives, saline and osmotic laxatives); antidiarrheal agents (e.g., LOMOTIL™ (diphenoxylate), MOTOFEN™ (diphenoxin), and IMODIUM™ (loperamide hydrochloride)), synthetic analogs of somatostatin such as SANDOSTATIN™ (octreotide), antiemetic agents (e.g., ZOFRAN™ (ondansetron), KYTRIL™ (granisetron hydrochloride), tropisetron, dolasetron, metoclopramide, chlorpromazine, perphenazine, prochlorperazine, promethazine, thiethylperazine, triflupromazine, domperidone, haloperidol, droperidol, trimethobenzanide, dexamethasone, methylprednisolone, dronabinol, and nabilone); D2 antagonists (e.g., metoclopramide, trimethobenzamide and chlorpromazine); bile salts; chenodeoxycholic acid; ursodeoxycholic acid; and pancreatic enzyme preparations such as pancreatin and pancrelipase.

[0883] In additional embodiments, the Therapeutics of the invention are administered in combination with other therapeutic or prophylactic regimens, such as, for example, radiation therapy.

### Example 14

### Method of Treating Decreased Levels of the Polypeptide

[0884] The present invention relates to a method for treating an individual in need of an increased level of a polypeptide of the invention in the body comprising administering to such an individual a composition comprising a therapeutically effective amount of polypeptides (including agonists thereto), and/or antibodies of the invention. Moreover, it will be appreciated that conditions caused by a decrease in the standard or normal expression level of a polypeptide of the present invention in an individual may be treated by administering agonists of said polypeptide. Thus, the invention also provides a method of treatment of an individual in need of an increased level of the polypeptide comprising administering to such an individual a Therapeutic comprising an amount of the agonist (including polypeptides and antibodies of the present invention) to increase the activity level of the polypeptide in such an individual.

[0885] For example, a patient with decreased levels of a polypeptide receives a daily dose 0.1-100 ug/kg of the agonist for six consecutive days. The exact details of the dosing scheme, based on administration and formulation, are provided in Example 13.

### Example 15

### Method of Treating Increased Levels of the Polypeptide

[0886] The present invention also relates to a method of treating an individual in need of a decreased level of a polypeptide of the invention in the body comprising administering to such an individual a composition comprising a therapeutically effective amount of an antagonist of the invention (including polypeptides and antibodies of the invention).

[0887] In one example, antisense technology is used to inhibit production of a polypeptide of the present invention. This technology is one example of a method of decreasing levels of a polypeptide, due to a variety of etiologies, such as cancer.

[0888] For example, a patient diagnosed with abnormally increased levels of a polypeptide is administered intravenously antisense polynucleotides at 0.5, 1.0, 1.5, 2.0 and 3.0 mg/kg day for 21 days. This treatment is repeated after a 7-day rest period if the treatment was well tolerated. The antisense polynucleotides of the present invention can be formulated using techniques and formulations described herein (e.g. see Example 13), or otherwise known in the art.

### Example 16

### Method of Treatment Using Gene Therapy-Ex Vivo

[0889] One method of gene therapy transplants fibroblasts, which are capable of expressing a polypeptide, onto a patient. Generally, fibroblasts are obtained from a subject by skin biopsy. The resulting tissue is placed in tissue-culture medium and separated into small pieces. Small chunks of the tissue are placed on a wet surface of a tissue culture flask, approximately ten pieces are placed in each flask. The flask is turned upside down, closed tight and left at room temperature over night. After 24 hours at room temperature, the flask is inverted and the chunks of tissue remain fixed to the bottom of the flask and fresh media (e.g., Ham's F12 media, with 10% FBS, penicillin and streptomycin) is added. The flasks are then incubated at 37 degree C. for approximately one week.

[0890] At this time, fresh media is added and subsequently changed every several days. After an additional two weeks in culture, a monolayer of fibroblasts emerge. The monolayer is trypsinized and scaled into larger flasks.

[0891] pMV-7 (Kirschmeier, P. T. et al., DNA, 7:219-25 (1988)), flanked by the long terminal repeats of the Moloney murine sarcoma virus, is digested with EcoRI and HindIII and subsequently treated with calf intestinal phosphatase. The linear vector is fractionated on agarose gel and purified, using glass beads.

[0892] The cDNA encoding a polypeptide of the present invention can be amplified using PCR primers which correspond to the 5′ and 3′ end sequences respectively as set forth in Example 1 using primers and having appropriate restriction sites and initiation/stop codons, if necessary. Preferably, the 5′ primer contains an EcoRI site and the 3′ primer includes a HindIII site. Equal quantities of the Moloney murine sarcoma virus linear backbone and the amplified EcoRI and HindIII fragment are added together, in the presence of T4 DNA ligase. The resulting mixture is maintained under conditions appropriate for ligation of the two fragments. The ligation mixture is then used to transform bacteria HB101, which are then plated onto agar containing kanamycin for the purpose of confirming that the vector has the gene of interest properly inserted.

[0893] The amphotropic pA317 or GP+am12 packaging cells are grown in tissue culture to confluent density in Dulbecco's Modified Eagles Medium (DMEM) with 10% calf serum (CS), penicillin and streptomycin. The MSV vector containing the gene is then added to the media and the packaging cells transduced with the vector. The packaging cells now produce infectious viral particles containing the gene (the packaging cells are now referred to as producer cells).

[0894] Fresh media is added to the transduced producer cells, and subsequently, the media is harvested from a 10 cm plate of confluent producer cells. The spent media, containing the infectious viral particles, is filtered through a millipore filter to remove detached producer cells and this media is then used to infect fibroblast cells. Media is removed from a sub-confluent plate of fibroblasts and quickly replaced with the media from the producer cells. This media is removed and replaced with fresh media. If the titer of virus is high, then virtually all fibroblasts will be infected and no selection is required. If the titer is very low, then it is necessary to use a retroviral vector that has a selectable marker, such as neo or his. Once the fibroblasts have been efficiently infected, the fibroblasts are analyzed to determine whether protein is produced.

[0895] The engineered fibroblasts are then transplanted onto the host, either alone or after having been grown to confluence on cytodex 3 microcarrier beads.

### Example 17

### Gene Therapy Using Endogenous Genes Corresponding to Polynucleotides of the Invention

[0896] Another method of gene therapy according to the present invention involves operably associating the endogenous polynucleotide sequence of the invention with a promoter via homologous recombination as described, for example, in U.S. Pat. No. 5,641,670, issued Jun. 24, 1997; International Publication NO: WO 96/29411, published Sep. 26, 1996; International Publication NO: WO 94/12650, published Aug. 4, 1994; Koller et al., Proc. Natl. Acad. Sci. USA, 86:8932-8935 (1989); and Zijlstra et al., Nature, 342:435-438 (1989). This method involves the activation of a gene which is present in the target cells, but which is not expressed in the cells, or is expressed at a lower level than desired.

[0897] Polynucleotide constructs are made which contain a promoter and targeting sequences, which are homologous to the 5′ non-coding sequence of endogenous polynucleotide sequence, flanking the promoter. The targeting sequence will be sufficiently near the 5′ end of the polynucleotide sequence so the promoter will be operably linked to the endogenous sequence upon homologous recombination. The promoter and the targeting sequences can be amplified using PCR. Preferably, the amplified promoter contains distinct restriction enzyme sites on the 5′ and 3′ ends. Preferably, the 3′ end of the first targeting sequence contains the same restriction enzyme site as the 5′ end of the amplified promoter and the 5′ end of the second targeting sequence contains the same restriction site as the 3′ end of the amplified promoter.

[0898] The amplified promoter and the amplified targeting sequences are digested with the appropriate restriction enzymes and subsequently treated with calf intestinal phosphatase. The digested promoter and digested targeting sequences are added together in the presence of T4 DNA ligase. The resulting mixture is maintained under conditions appropriate for ligation of the two fragments. The construct is size fractionated on an agarose gel, then purified by phenol extraction and ethanol precipitation.

[0899] In this Example, the polynucleotide constructs are administered as naked polynucleotides via electroporation. However, the polynucleotide constructs may also be administered with transfection-facilitating agents, such as liposomes, viral sequences, viral particles, precipitating agents, etc. Such methods of delivery are known in the art.

[0900] Once the cells are transfected, homologous recombination will take place which results in the promoter being operably linked to the endogenous polynucleotide sequence. This results in the expression of polynucleotide corresponding to the polynucleotide in the cell. Expression may be detected by immunological staining, or any other method known in the art.

[0901] Fibroblasts are obtained from a subject by skin biopsy. The resulting tissue is placed in DMEM+10% fetal calf serum. Exponentially growing or early stationary phase fibroblasts are trypsinized and rinsed from the plastic surface with nutrient medium An aliquot of the cell suspension is removed for counting, and the remaining cells are subjected to centrifugation. The supernatant is aspirated and the pellet is resuspended in 5 ml of electroporation buffer (20 mM HEPES pH 7.3, 137 mM NaCl, 5 mM KCl, 0.7 mM Na₂ HPO₄, 6 mM dextrose). The cells are recentrifuged, the supernatant aspirated, and the cells resuspended in electroporation buffer containing 1 mg/ml acetylated bovine serum albumin. The final cell suspension contains approximately 3×10⁶ cells/ml. Electroporation should be performed immediately following resuspension.

[0902] Plasmid DNA is prepared according to standard techniques. For example, to construct a plasmid for targeting to the locus corresponding to the polynucleotide of the invention, plasmid pUC18 (MBI Fermentas, Amherst, N.Y.) is digested with HindIII. The CMV promoter is amplified by PCR with an XbaI site on the 5′ end and a BamHI site on the 3′ end. Two non-coding sequences are amplified via PCR: one non-coding sequence (fragment 1) is amplified with a Hindi site at the 5′ end and an Xba site at the 3′ end; the other non-coding sequence (fragment 2) is amplified with a BamHI site at the 5′ end and a HindIII site at the 3′ end. The CMV promoter and the fragments (1 and 2) are digested with the appropriate enzymes (CMV promoter—XbaI and BamHI; fragment 1—XbaI; fragment 2—BamHI) and ligated together. The resulting ligation product is digested with HindIII, and ligated with the HindIII-digested pUC18 plasmid.

[0903] Plasmid DNA is added to a sterile cuvette with a 0.4 cm electrode gap (Bio-Rad). The final DNA concentration is generally at least 120 μg/ml. 0.5 ml of the cell suspension (containing approximately 1.5×10⁶ cells) is then added to the cuvette, and the cell suspension and DNA solutions are gently mixed. Electroporation is performed with a Gene-Pulser apparatus (Bio-Rad). Capacitance and voltage are set at 960 μF and 250-300 V, respectively. As voltage increases, cell survival decreases, but the percentage of surviving cells that stably incorporate the introduced DNA into their genome increases dramatically. Given these parameters, a pulse time of approximately 14-20 mSec should be observed.

[0904] Electroporated cells are maintained at room temperature for approximately 5 min, and the contents of the cuvette are then gently removed with a sterile transfer pipette. The cells are added directly to 10 ml of prewarmed nutrient media (DMEM with 15% calf serum) in a 10 cm dish and incubated at 37 degree C. The following day, the media is aspirated and replaced with 10 ml of fresh media and incubated for a further 16-24 hours.

[0905] The engineered fibroblasts are then injected into the host, either alone or after having been grown to confluence on cytodex 3 microcarrier beads. The fibroblasts now produce the protein product. The fibroblasts can then be introduced into a patient as described above.

### Example 18

### Method of Treatment Using Gene Therapy—in Vivo

[0906] Another aspect of the present invention is using in vivo gene therapy methods to prevent, treat, and/or ameliorate gastrointestinal diseases and disorders. The gene therapy method relates to the introduction of naked nucleic acid (DNA, RNA, and antisense DNA or RNA) sequences into an animal to increase or decrease the expression of the polypeptide. The polynucleotide of the present invention may be operatively linked to (i.e., associated with) a promoter or any other genetic elements necessary for the expression of the polypeptide by the target tissue. Such gene therapy and delivery techniques and methods are known in the art, see, for example, WO90/11092, WO98/11779; U.S. Pat. Nos. 5,693,622, 5,705,151, 5,580,859; Tabata et al., Cardiovasc. Res. 35(3):470-479 (1997); Chao et al., Pharmacol. Res. 35(6):517-522 (1997); Wolff, Neuromuscul. Disord. 7(5):314-318 (1997); Schwartz et al., Gene Ther. 3(5):405-411 (1996); Tsurumi et Circulation 94(12):3281-3290 (1996) (incorporated herein by reference).

[0907] The polynucleotide constructs may be delivered by any method that delivers injectable materials to the cells of an animal, such as, injection into the interstitial space of tissues (heart, muscle, skin, lung, liver, intestine and the like). The polynucleotide constructs can be delivered in a pharmaceutically acceptable liquid or aqueous carrier.

[0908] The term “naked” polynucleotide, DNA or RNA, refers to sequences that are free from any delivery vehicle that acts to assist, promote, or facilitate entry into the cell, including viral sequences, viral particles, liposome formulations, lipofectin or precipitating agents and the like. However, the polynucleotides of the present invention may also be delivered in liposome formulations (such as those taught in Felgner P. L. et al. (1995) Ann. NY Acad. Sci. 772:126-139 and Abdallah B. et al. (1995) Biol. Cell 85(1):1-7) which can be prepared by methods well known to those skilled in the art.

[0909] The polynucleotide vector constructs used in the gene therapy method are preferably constructs that will not integrate into the host genome nor will they contain sequences that allow for replication. Any strong promoter known to those skilled in the art can be used for driving the expression of DNA. Unlike other gene therapy techniques, one major advantage of introducing naked nucleic acid sequences into target cells is the transitory nature of the polynucleotide synthesis in the cells. Studies have shown that non-replicating DNA sequences can be introduced into cells to provide production of the desired polypeptide for periods of up to six months.

[0910] The polynucleotide construct can be delivered to the interstitial space of tissues within an animal, including muscle, skin, brain, lung, liver, spleen, bone marrow, thymus, heart, lymph, blood, bone, cartilage, pancreas, kidney, gall bladder, stomach, intestine, testis, ovary, uterus, rectum, nervous system, eye, gland, and connective tissue. Interstitial space of the tissues comprises the intercellular fluid, mucopolysaccharide matrix among the reticular fibers of organ tissues, elastic fibers in the walls of vessels or chambers, collagen fibers of fibrous tissues, or that same matrix within connective tissue ensheathing muscle cells or in the lacunae of bone. It is similarly the space occupied by the plasma of the circulation and the lymph fluid of the lymphatic channels. Delivery to the interstitial space of muscle tissue is preferred for the reasons discussed below. They may be conveniently delivered by injection into the tissues comprising these cells. They are preferably delivered to and expressed in persistent, non-dividing cells which are differentiated, although delivery and expression may be achieved in nondifferentiated or less completely differentiated cells, such as, for example, stem cells of blood or skin fibroblasts. In vivo muscle cells are particularly competent in their ability to take up and express polynucleotides.

[0911] For the naked polynucleotide injection, an effective dosage amount of DNA or RNA will be in the range of from about 0.05 g/kg body weight to about 50 mg/kg body weight. Preferably the dosage will be from about 0.005 mg/kg to about 20 mg/kg and more preferably from about 0.05 mg/kg to about 5 mg/kg. Of course, as the artisan of ordinary skill will appreciate, this dosage will vary according to the tissue site of injection. The appropriate and effective dosage of nucleic acid sequence can readily be determined by those of ordinary skill in the art and may depend on the condition being treated and the route of administration. The preferred route of administration is by the parenteral route of injection into the interstitial space of tissues. However, other parenteral routes may also be used, such as, inhalation of an aerosol formulation particularly for delivery to lungs or bronchial tissues, throat or mucous membranes of the nose. In addition, naked polynucleotide constructs can be delivered to arteries during angioplasty by the catheter used in the procedure.

[0912] The dose response effects of injected polynucleotide in muscle in vivo is determined as follows. Suitable template DNA for production of mRNA coding for polypeptide of the present invention is prepared in accordance with a standard recombinant DNA methodology. The template DNA, which may be either circular or linear, is either used as naked DNA or complexed with liposomes. The quadriceps muscles of mice are then injected with various amounts of the template DNA.

[0913] Five to six week old female and male Balb/C mice are anesthetized by intraperitoneal injection with 0.3 ml of 2.5% Avertin. A 1.5 cm incision is made on the anterior thigh, and the quadriceps muscle is directly visualized. The template DNA is injected in 0.1 ml of carrier in a 1 cc syringe through a 27 gauge needle over one minute, approximately 0.5 cm from the distal insertion site of the muscle into the knee and about 0.2 cm deep. A suture is placed over the injection site for future localization, and the skin is closed with stainless steel clips.

[0914] After an appropriate incubation time (e.g., 7 days) muscle extracts are prepared by excising the entire quadriceps. Every fifth 15 um cross-section of the individual quadriceps muscles is histochemically stained for protein expression. A time course for protein expression may be done in a similar fashion except that quadriceps from different mice are harvested at different times. Persistence of DNA in muscle following injection may be determined by Southern blot analysis after preparing total cellular DNA and HIRT supernatants from injected and control mice. The results of the above experimentation in mice can be used to extrapolate proper dosages and other treatment parameters in humans and other animals using naked DNA.

### Example 19

### Transgenic Animals

[0915] The polypeptides of the invention can also be expressed in transgenic animals. Animals of any species, including, but not limited to, mice, rats, rabbits, hamsters, guinea pigs, pigs, micro-pigs, goats, sheep, cows and non-human primates, e.g., baboons, monkeys, and chimpanzees may be used to generate transgenic animals. In a specific embodiment, techniques described herein or otherwise known in the art, are used to express polypeptides of the invention in humans, as part of a gene therapy protocol.

[0916] Any technique known in the art may be used to introduce the transgene (i.e., polynucleotides of the invention) into animals to produce the founder lines of transgenic animals. Such techniques include, but are not limited to, pronuclear microinjection (Paterson et al., Appl. Microbiol. Biotechnol. 40:691-698 (1994); Carver et al., Biotechnology (NY) 11:1263-1270 (1993); Wright et al., Biotechnology (NY) 9:830-834 (1991); and Hoppe et al., U.S. Pat. No. 4,873,191 (1989)); retrovirus mediated genie transfer into germ lines (Van der Putten et al., Proc. Natl. Acad. Sci., USA 82:6148-6152 (1985)), blastocysts or embryos; gene targeting in embryonic stem cells (Thompson et al., Cell 56:313-321 (1989)); electroporation of cells or embryos (Lo, 1983, Mol Cell. Biol. 3:1803-1814 (1983)); introduction of the polynucleotides of the invention using a gene gun (see, e.g., Ulmer et al., Science 259:1745 (1993); introducing nucleic acid constructs into embryonic pleuripotent stem cells and transferring the stem cells back into the blastocyst; and sperm-mediated gene transfer (Lavitrano et al., Cell 57:717-723 (1989); etc. For a review of such techniques, see Gordon, “Transgenic Animals,” Intl. Rev. Cytol. 115:171-229 (1989), which is incorporated by reference herein in its entirety.

[0917] Any technique known in the art may be used to produce transgenic clones containing polynucleotides of the invention, for example, nuclear transfer into enucleated oocytes of nuclei from cultured embryonic, fetal, or adult cells induced to quiescence (Campell et al., Nature 380:64-66 (1996); Wilmut et al., Nature 385:810-813 (1997)).

[0918] The present invention provides for transgenic animals that carry the transgene in all their cells, as well as animals which carry the transgene in some, but not all their cells, ie., mosaic animals or chimeric. The transgene may be integrated as a single transgene or as multiple copies such as in concatamers, e.g., head-to-head tandems or head-to-tail tandems. The transgene may also be selectively introduced into and activated in a particular cell type by following, for example, the teaching of Lasko et al. (Lasko et al., Proc. Natl. Acad. Sci. USA 89:6232-6236 (1992)). The regulatory sequences required for such a cell-type specific activation will depend upon the particular cell type of interest, and will be apparent to those of skill in the art. When it is desired that the polynucleotide transgene be integrated into the chromosomal site of the endogenous gene, gene targeting is preferred. Briefly, when such a technique is to be utilized, vectors containing some nucleotide sequences homologous to the endogenous gene are designed for the purpose of integrating, via homologous recombination with chromosomal sequences, into and disrupting the function of the nucleotide sequence of the endogenous gene. The transgene may also be selectively introduced into a particular cell type, thus inactivating the endogenous gene in only that cell type, by following, for example, the teaching of Gu et al. (Gu et al., Science 265:103-106 (1994)). The regulatory sequences required for such a cell-type specific inactivation will depend upon the particular cell type of interest, and will be apparent to those of skill in the art.

[0919] Once transgenic animals have been generated, the expression of the recombinant gene may be assayed utilizing standard techniques. Initial screening may be accomplished by Southern blot analysis or PCR techniques to analyze animal tissues to verify that integration of the transgene has taken place. The level of mRNA expression of the transgene in the tissues of the transgenic animals may also be assessed using techniques which include, but are not limited to, Northern blot analysis of tissue samples obtained from the animal, in situ hybridization analysis, and reverse transcriptase-PCR (rt-PCR). Samples of transgenic gene-expressing tissue may also be evaluated immunocytochemically or imnmunohistochemically using antibodies specific for the transgene product.

[0920] Once the founder animals are produced, they may be bred, inbred, outbred, or crossbred to produce colonies of the particular animal. Examples of such breeding strategies include, but are not limited to: outbreeding of founder animals with more than one integration site in order to establish separate lines; inbreeding of separate lines in order to produce compound transgenics that express the transgene at higher levels because of the effects of additive expression of each transgene; crossing of heterozygous transgenic animals to produce animals homozygous for a given integration site in order to both augment expression and eliminate the need for screening of animals by DNA analysis; crossing of separate homozygous lines to produce compound heterozygous or homozygous lines; and breeding to place the transgene on a distinct background that is appropriate for an experimental model of interest.

[0921] Transgenic animals of the invention have uses which include, but are not limited to, animal model systems useful in elaborating the biological function of polypeptides of the present invention, studying conditions and/or disorders associated with aberrant expression, and in screening for compounds effective in ameliorating such conditions and/or disorders.

### Example 20

### Knock-Out Animals

[0922] Endogenous gene expression can also be reduced by inactivating or “knocking out” the gene and/or its promoter using targeted homologous recombination. (e.g., see Smithies et al., Nature 317:230-234 (1985); Thomas & Capecchi, Cell 51:503-512 (1987); Thompson et al., Cell 5:313-321 (1989); each of which is incorporated by reference herein in its entirety). For example, a mutant, non-functional polynucleotide of the invention (or a completely unrelated DNA sequence) flanked by DNA homologous to the endogenous polynucleotide sequence (either the coding regions or regulatory regions of the gene) can be used, with or without a selectable marker and/or a negative selectable marker, to transfect cells that express polypeptides of the invention in vivo. In another embodiment, techniques known in the art are used to generate knockouts in cells that contain, but do not express the gene of interest. Insertion of the DNA construct, via targeted homologous recombination, results in inactivation of the targeted gene. Such approaches are particularly suited in research and agricultural fields where modifications to embryonic stem cells can be used to generate animal offspring with an inactive targeted gene (e.g., see Thomas & Capecchi 1987 and Thompson 1989, supra). However this approach can be routinely adapted for use in humans provided the recombinant DNA constructs are directly administered or targeted to the required site in vivo using appropriate viral vectors that will be apparent to those of skill in the art.

[0923] In further embodiments of the invention, cells that are genetically engineered to express the polypeptides of the invention, or alternatively, that are genetically engineered not to express the polypeptides of the invention (e.g., knockouts) are administered to a patient in vivo. Such cells may be obtained from the patient (i.e., animal, including human) or an MHC compatible donor and can include, but are not limited to fibroblasts, bone marrow cells, blood cells (e.g., lymphocytes), adipocytes, muscle cells, endothelial cells etc. The cells are genetically engineered in vitro using recombinant DNA techniques to introduce the coding sequence of polypeptides of the invention into the cells, or alternatively, to disrupt the coding sequence and/or endogenous regulatory sequence associated with the polypeptides of the invention, e.g., by transduction (using viral vectors, and preferably vectors that integrate the transgene into the cell genome) or transfection procedures, including, but not limited to, the use of plasmids, cosmids, YACs, naked DNA, electroporation, liposomes, etc. The coding sequence of the polypeptides of the invention can be placed under the control of a strong constitutive or inducible promoter or promoter/enhancer to achieve expression, and preferably secretion, of the polypeptides of the invention. The engineered cells which express and preferably secrete the polypeptides of the invention can be introduced into the patient systemically, e.g., in the circulation, or intraperitoneally.

[0924] Alternatively, the cells can be incorporated into a matrix and implanted in the body, e.g., genetically engineered fibroblasts can be implanted as part of a skin graft; genetically engineered endothelial cells can be implanted as part of a lymphatic or vascular graft. (See, for example, Anderson et al. U.S. Pat. No. 5,399,349; and Mulligan & Wilson, U.S. Pat. No. 5,460,959 each of which is incorporated by reference herein in its entirety).

[0925] When the cells to be administered are non-autologous or non-MHC compatible cells, they can be administered using well known techniques which prevent the development of a host immune response against the introduced cells. For example, the cells may be introduced in an encapsulated form which, while allowing for an exchange of components with the immediate extracellular environment, does not allow the introduced cells to be recognized by the host immune system.

[0926] Transgenic and “knock-out” animals of the invention have uses which include, but are not limited to, animal model systems useful in elaborating the biological function of polypeptides of the present invention, studying conditions and/or disorders associated with aberrant expression, and in screening for compounds effective in ameliorating such conditions and/or disorders.

### Example 21

### Production of Polypeptide of the Invention for High-Throughput Screening Assays

[0927] The following protocol produces a supernatant containing polypeptide of the present invention to be tested. This supernatant can then be used in the Screening Assays described in Examples 32-41.

[0928] First, dilute Poly-D-Lysine (644 587 Boehringer-Mannheim) stock solution (1 mg/ml in PBS) 1:20 in PBS (w/o calcium or magnesium 17-516F Biowhittaker) for a working solution of 50 ug/ml. Add 200 ul of this solution to each well (24 well plates) and incubate at RT for 20 minutes. Be sure to distribute the solution over each well (note: a 12-channel pipetter may be used with tips on every other channel). Aspirate off the Poly-D-Lysine solution and rinse with 1 ml PBS (Phosphate Buffered Saline). The PBS should remain in the well until just prior to plating the cells and plates may be poly-lysine coated in advance for up to two weeks.

[0929] Plate 293T cells (do not carry cells past P+20) at 2×10⁵ cells/well in 0.5 ml DMEM(Dulbecco's Modified Eagle Medium)(with 4.5 G/L glucose and L-glutamine (12-604F Biowhittaker))/10% heat inactivated FBS(14-503F Biowhittaker)1× Penstrep(17-602E Biowhittaker). Let the cells grow overnight.

[0930] The next day, mix together in a sterile solution basin: 300 ul Lipofectamine (18324-012 Gibco/BRL) and 5 ml Optimem I (31985070 Gibco/BRL)/96-well plate. With a small volume multi-channel pipetter, aliquot approximately 2 ug of an expression vector containing a polynucleotide insert, produced by the methods described in Examples 8-10, into an appropriately labeled 96-well round bottom plate. With a multi-channel pipetter, add 50 ul of the Lipofectamine/Optimem I mixture to each well. Pipette up and down gently to mix. Incubate at RT 15-45 minutes. After about 20 minutes, use a multi-channel pipetter to add 150 ul Optimem I to each well. As a control, one plate of vector DNA lacking an insert should be transfected with each set of transfections.

[0931] Preferably, the transfection should be performed by tag-teaming the following tasks. By tag-teaming, hands on time is cut in half, and the cells do not spend too much time on PBS. First, person A aspirates off the media from four 24-well plates of cells, and then person B rinses each well with 0.5-1 ml PBS. Person A then aspirates off PBS rinse, and person B, using a 12-channel pipetter with tips on every other channel, adds the 200 ul of DNA/Lipofectamine/Optimem I complex to the odd wells first, then to the even wells, to each row on the 24-well plates. Incubate at 37 degree C. for 6 hours.

[0932] While cells are incubating, prepare appropriate media, either 1% BSA in DMEM with 1× penstrep, or HGS CHO-5 media (116.6 mg/L of CaCl2 (anhyd); 0.00130 mg/L CuSO₄-5H₂O; 0.050 mg/L of Fe(NO₃)₃-9H₂O; 0.417 mg/L of FeSO₄-7H₂O; 311.80 mg/L of Kcl; 28.64 mg/L of MgCl₂; 48.84 mg/L of MgSO₄; 6995.50 mg/L of NaCl; 2400.0 mg/L of NaHCO₃; 62.50 mg/L of NaH₂PO₄-H₂0; 71.02 mg/L of Na₂HPO4; 0.4320 mg/L of ZnSO₄-7H₂O; 0.002 mg/L of Arachidonic Acid; 1.022 mg/L of Cholesterol; 0.070 mg/L of DL-alpha-Tocopherol-Acetate; 0.0520 mg/L of Linoleic Acid; 0.010 mg/L of Linolenic Acid; 0.010 mg/L of Myristic Acid; 0.010 mg/L of Oleic Acid; 0.010 mg/L of Palmitric Acid; 0.010 mg/L of Palmitic Acid; 100 mg/L of Pluronic F-68; 0.010 mg/L of Stearic Acid; 2.20 mg/L of Tween 80; 4551 mg/L of D-Glucose; 130.85 mg/ml of L-Alanine; 147.50 mg/ml of L-Arginine-HCL; 7.50 mg/ml of L-Asparagine-H₂0; 6.65 mg/ml of L-Aspartic Acid; 29.56 mg/ml of L-Cystine-2HCL-H₂0; 31.29 mg/ml of L-Cystine-2HCL; 7.35 mg/ml of L-Glutamic Acid; 365.0 mg/ml of L-Glutamine; 18.75 mg/ml of Glycine; 52.48 mg/ml of L-Histidine-HCL-H₂0; 106.97 mg/ml of L-Isoleucine; 111.45 mg/ml of L-Leucine; 163.75 mg/ml of L-Lysine HCL; 32.34 mg/ml of L-Methionine; 68.48 mg/ml of L-Phenylalainine; 40.0 mg/ml of L-Proline; 26.25 mg/ml of L-Serine; 101.05 mg/ml of L-Threonine; 19.22 mg/ml of L-Tryptophan; 91.79 mg/ml of L-Tryrosine-2Na-2H₂0; and 99.65 mg/ml of L-Valine; 0.0035 mg/L of Biotin; 3.24 mg/L of D-Ca Pantothenate; 11.78 mg/L of Choline Chloride; 4.65 mg/L of Folic Acid; 15.60 mg/L of i-Inositol; 3.02 mg/L of Niacinamide; 3.00 mg/L of Pyridoxal HCL; 0.031 mg/L of Pyridoxine HCL; 0.319 mg/L of Riboflavin; 3.17 mg/L of Thiamine HCL; 0.365 mg/L of Thymidine; 0.680 mg/L of Vitamin B₁₂; 25 mM of HEPES Buffer; 2.39 mg/L of Na Hypoxanthine; 0.105 mg/L of Lipoic Acid; 0.081 mg/L of Sodium Putrescine-2HCL; 55.0 mg/L of Sodium Pyruvate; 0.0067 mg/L of Sodium Selenite; 20 uM of Ethanolamine; 0.122 mg/L of Ferric Citrate; 41.70 mg/L of Methyl-B-Cyclodextrin complexed with Linoleic Acid; 33.33 mg/L of Methyl-B-Cyclodextrin complexed with Oleic Acid; 10 mg/L of Methyl-B-Cyclodextrin complexed with Retinal Acetate. Adjust osmolarity to 327 mOsm) with 2 mm glutamine and 1× penstrep. (BSA (81-068-3 Bayer) 100 gm dissolved in 1 L DMEM for a 10% BSA stock solution). Filter the media and collect 50 ul for endotoxin assay in 15 ml polystyrene conical.

[0933] The transfection reaction is terminated, preferably by tag-teaming, at the end of the incubation period. Person A aspirates off the transfection media, while person B adds 1.5 ml appropriate media to each well. Incubate at 37 degree C. for 45 or 72 hours depending on the media used: 1% BSA for 45 hours or CHO-5 for 72 hours.

[0934] On day four, using a 300 ul multichannel pipetter, aliquot 600 ul in one 1 ml deep well plate and the remaining supernatant into a 2 ml deep well. The supernatants from each well can then be used in the assays described in Examples 32-39.

[0935] It is specifically understood that when activity is obtained in any of the assays described below using a supernatant, the activity originates from either the polypeptide of the present invention directly (e.g., as a secreted protein) or by polypeptide of the present invention inducing expression of other proteins, which are then secreted into the supernatant. Thus, the invention further provides a method of identifying the protein in the supernatant characterized by an activity in a particular assay.

### Example 22

### Construction of GAS Reporter Construct

[0936] One signal transduction pathway involved in the differentiation and proliferation of cells is called the Jaks-STATs pathway. Activated proteins in the Jaks-STATs pathway bind to gamma activation site “GAS” elements or interferon-sensitive responsive element (“ISRE”), located in the promoter of many genes. The binding of a protein to these elements alter the expression of the associated gene.

[0937] GAS and ISRE elements are recognized by a class of transcription factors called Signal Transducers and Activators of Transcription, or “STATs.” There are six members of the STATs family. Stat1 and Stat3 are present in many cell types, as is Stat2 (as response to IFN-alpha is widespread). Stat4 is more restricted and is not in many cell types though it has been found in T helper class I, cells after treatment with IL-12. Stat5 was originally called mammary growth factor, but has been found at higher concentrations in other cells including myeloid cells. It can be activated in tissue culture cells by many cytokines.

[0938] The STATs are activated to translocate from the cytoplasm to the nucleus upon tyrosine phosphorylation by a set of kinases known as the Janus Kinase (“Jaks”) family. Jaks represent a distinct family of soluble tyrosine kinases and include Tyk2, Jak1, Jak2, and Jak3. These kinases display significant sequence similarity and are generally catalytically inactive in resting cells.

[0939] The Jaks are activated by a wide range of receptors summarized in the Table below. (Adapted from review by Schidler and Darnell, Ann. Rev. Biochem. 64:621-51 (1995)). A cytokine receptor family, capable of activating Jaks, is divided into two groups: (a) Class 1 includes receptors for IL-2, IL-3, IL4, IL-6, IL-7, IL-9, IL-11, IL-12, IL-15, Epo, PRL, GH, G-CSF, GM-CSF, LIF, CNTF, and thrombopoietin; and (b) Class 2 includes IFN-a, IFN-g, and IL-10. The Class 1 receptors share a conserved cysteine motif (a set of four conserved cysteines and one tryptophan) and a WSXWS motif (a membrane proximal region encoding Trp-Ser-Xaa-Trp-Ser (SEQ ID NO: 2)).

[0940] Thus, on binding of a ligand to a receptor, Jaks are activated, which in turn activate STATs, which then translocate and bind to GAS elements. This entire process is encompassed in the Jaks-STATs signal transduction pathway. Therefore, activation of the Jaks-STATs pathway, reflected by the binding of the GAS or the ISRE element, can be used to indicate proteins involved in the proliferation and differentiation of cells. For example, growth factors and cytokines are known to activate the Jaks-STATs pathway (See Table below). Thus, by using GAS elements linked to reporter molecules, activators of the Jaks-STATs pathway can be identified.

| | | JAKs | | | | |
|---|---|---|---|---|---|---|
| Ligand | tyk2 | Jak1 | Jak2 | Jak3 | STATS | GAS(elements) or ISRE |
| IFN family | | | | | | |
| IFN-a/B | + | + | − | − | 1, 2, 3 | ISRE |
| IFN-g | | + | + | − | 1 | GAS (IRF1 > Lys6 > IFP) |
| Il-10 | + | ? | ? | − | 1, 3 | |
| gp130 family | | | | | | |
| IL-6 (Pleiotropic) | + | + | + | ? | 1, 3 | GAS (IRF1 > Lys6 > IFP) |
| Il-11(Pleiotropic) | ? | + | ? | ? | 1, 3 | |
| OnM(Pleiotropic) | ? | + | + | ? | 1, 3 | |
| LIF(Pleiotropic) | ? | + | + | ? | 1, 3 | |
| CNTF(Pleiotropic) | −/+ | + | + | ? | 1, 3 | |
| G-CSF(Pleiotropic) | ? | + | ? | ? | 1, 3 | |
| IL-12(Pleiotropic) | + | − | + | + | 1, 3 | |
| g-C family | | | | | | |
| IL-2 (lymphocytes) | − | + | − | + | 1, 3, 5 | GAS |
| IL-4 (lymph/myeloid) | − | + | − | + | 6 | GAS (IRF1 = IFP >> Ly6)(IgH) |
| IL-7 (lymphocytes) | − | + | − | + | 5 | GAS |
| IL-9 (lymphocytes) | − | + | − | + | 5 | GAS |
| IL-13 (lymphocyte) | − | + | ? | ? | 6 | GAS |
| IL-15 | ? | + | ? | + | 5 | GAS |
| gp140 family | | | | | | |
| IL-3 (myeloid) | − | − | + | − | 5 | GAS (IRF1 > IFP >> Ly6) |
| IL-5 (myeloid) | − | − | + | − | 5 | GAS |
| GM-CSF (myeloid) | − | − | + | − | 5 | GAS |
| Growth hormone family | | | | | | |
| GH | ? | − | + | − | 5 | |
| PRL | ? | +/− | + | − | 1, 3, 5 | |
| EPO | ? | − | + | − | 5 | GAS(B-CAS > IRF1 = IFP >> Ly6) |
| Receptor Tyrosine Kinases | | | | | | |
| EGF | ? | + | + | − | 1, 3 | GAS (IRF1) |
| PDGF | ? | + | + | − | 1, 3 | |
| CSF-1 | ? | + | + | − | 1, 3 | GAS (not IRF1) |

[0941] To construct a synthetic GAS containing promoter element, which is used in the Biological Assays described in Examples 32-33, a PCR based strategy is employed to generate a GAS-SV40 promoter sequence. The 5′ primer contains four tandem copies of the GAS binding site found in the IRF1 promoter and previously demonstrated to bind STATs upon induction with a range of cytokines (Rothman et al., Immunity 1:457-468 (1994).), although other GAS or ISRE elements can be used instead. The 5′ primer also contains 18 bp of sequence complementary to the SV40 early promoter sequence and is flanked with an XhoI site. The sequence of the 5′ primer is:

| | |
|---|---|
| 5′:GCGCCTCGAGATTTCCCCGAAATCTAGATTTCC | (SEQ ID NO: 3) |
| CCGAAATGATTTCCCCGAAATGATTTCCCCGAAATA | |
| TCTGCCATCTCAATTAG:3′ | |

[0942] The downstream primer is complementary to the SV40 promoter and is flanked with a Hind III site: 5′: GCGGCAAGCTTTTTGCAAAGCCTAGGC: 3′ (SEQ ID NO: 4)

[0943] PCR amplification is performed using the SV40 promoter template present in the B-gal: promoter plasmid obtained from Clontech. The resulting PCR fragment is digested with XhoI/Hind III and subcloned into BLSK2-. (Stratagene.) Sequencing with forward and reverse primers confirms that the insert contains the following sequence:

| | |
|---|---|
| 5′:CTCGAGATTTCCCCGAAATCTAGATTTCCCCGA | (SEQ ID NO: 5) |
| AATGATTTCCCCGAAATGATTTCCCCGAAATATCTG | |
| CCATCTCAATTAGTCAGCAACCATAGTCCCGCCCCT | |
| AACTCCGCCCATCCCGCCCCTAACTCCGCCCAGTTC | |
| CGCCCATTCTCCGCCCCATGGCTGACTAATTTTTTT | |
| TATTTATGCAGAGGCCGAGGCCGCCTCGGCCTCTGA | |
| GCTATTCCAGAAGTAGTGAGGAGGCTTTTTTGGAGG | |
| CCTAGGCTTTTGCAAAAAGCTT:3′ | |

[0944] With this GAS promoter element linked to the SV40 promoter, a GAS:SEAP2 reporter construct is next engineered. Here, the reporter molecule is a secreted alkaline phosphatase, or “SEAP.” Clearly, however, any reporter molecule can be instead of SEAP, in this or in any of the other Examples. Well known reporter molecules that can be used instead of SEAP include chloramphenicol acetyltransferase (CAT), luciferase, alkaline phosphatase, B-galactosidase, green fluorescent protein (GFP), or any protein detectable by an antibody.

[0945] The above sequence confirmed synthetic GAS-SV40 promoter element is subcloned into the pSEAP-Promoter vector obtained from Clontech using HindIII and XhoI, effectively replacing the SV40 promoter with the amplified GAS:SV40 promoter element, to create the GAS-SEAP vector. However, this vector does not contain a neomycin resistance gene, and therefore, is not preferred for mammalian expression systems.

[0946] Thus, in order to generate mammalian stable cell lines expressing the GAS-SEAP reporter, the GAS-SEAP cassette is removed from the GAS-SEAP vector using SalI and NotI, and inserted into a backbone vector containing the neomycin resistance gene, such as pGFP-1 (Clontech), using these restriction sites in the multiple cloning site, to create the GAS-SEAP/Neo vector. Once this vector is transfected into mammalian cells, this vector can then be used as a reporter molecule for GAS binding as described in Examples 32-33.

[0947] Other constructs can be made using the above description and replacing GAS with a different promoter sequence. For example, construction of reporter molecules containing EGR and NF-KB promoter sequences are described in Examples 34 and 35. However, many other promoters can be substituted using the protocols described in these Examples. For instance, SRE, IL-2, NFAT, or Osteocalcin promoters can be substituted, alone or in combination (e.g., GAS/NF-KB/EGR, GAS/NF-KB, Il-2/NFAT, or NF-KB/GAS). Similarly, other cell lines can be used to test reporter construct activity, such as HELA (epithelial), HUVEC (endothelial), Reh (B-cell), Saos-2 (osteoblast), HUVAC (aortic), or Cardiomyocyte.

### Example 23

### Assay for SEAP Activity

[0948] As a reporter molecule for the assays described in Examples 32-35, SEAP activity is assayed using the Tropix Phospho-light Kit (Cat. BP-400) according to the following general procedure. The Tropix Phospho-light Kit supplies the Dilution, Assay, and Reaction Buffers used below.

[0949] Prime a dispenser with the 2.5× Dilution Buffer and dispense 15 ul of 2.5× dilution buffer into Optiplates containing 35 ul of a supernatant. Seal the plates with a plastic sealer and incubate at 65 degree C. for 30 min. Separate the Optiplates to avoid uneven heating.

[0950] Cool the samples to room temperature for 15 minutes. Empty the dispenser and prime with the Assay Buffer. Add 50 ml Assay Buffer and incubate at room temperature 5 min. Empty the dispenser and prime with the Reaction Buffer (see the Table below). Add 50 ul Reaction Buffer and incubate at room temperature for 20 minutes. Since the intensity of the chemiluminescent signal is time dependent, and it takes about 10 minutes to read 5 plates on a luminometer, thus one should treat 5 plates at each time and start the second set 10 minutes later.

[0951] Read the relative light unit in the luminometer. Set H12 as blank, and print the results. An increase in chemiluminescence indicates reporter activity.

Reaction Buffer Formulation:

| | Rxn buffer | |
|---|---|---|
| # of plates | diluent (ml) | CSPD (ml) |
| 10 | 60 | 3 |
| 11 | 65 | 3.25 |
| 12 | 70 | 3.5 |
| 13 | 75 | 3.75 |
| 14 | 80 | 4 |
| 15 | 85 | 4.25 |
| 16 | 90 | 4.5 |
| 17 | 95 | 4.75 |
| 18 | 100 | 5 |
| 19 | 105 | 5.25 |
| 20 | 110 | 5.5 |
| 21 | 115 | 5.75 |
| 22 | 120 | 6 |
| 23 | 125 | 6.25 |
| 24 | 130 | 6.5 |
| 25 | 135 | 6.75 |
| 26 | 140 | 7 |
| 27 | 145 | 7.25 |
| 28 | 150 | 7.5 |
| 29 | 155 | 7.75 |
| 30 | 160 | 8 |
| 31 | 165 | 8.25 |
| 32 | 170 | 8.5 |
| 33 | 175 | 8.75 |
| 34 | 180 | 9 |
| 35 | 185 | 9.25 |
| 36 | 190 | 9.5 |
| 37 | 195 | 9.75 |
| 38 | 200 | 10 |
| 39 | 205 | 10.25 |
| 40 | 210 | 10.5 |
| 41 | 215 | 10.75 |
| 42 | 220 | 11 |
| 43 | 225 | 11.25 |
| 44 | 230 | 11.5 |
| 45 | 235 | 11.75 |
| 46 | 240 | 12 |
| 47 | 245 | 12.25 |
| 48 | 250 | 12.5 |
| 49 | 255 | 12.75 |
| 50 | 260 | 13 |

### Example 24

### High-Throughput Screening Assay Identifying Changes in Small Molecule Concentration and Membrane Permeability

[0952] Binding of a ligand to a receptor is known to alter intracellular levels of small molecules, such as calcium, potassium, sodium, and pH, as well as alter membrane potential. These alterations can be measured in an assay to identify supernatants which bind to receptors of a particular cell. Although the following protocol describes an assay for calcium, this protocol can easily be modified to detect changes in potassium, sodium, pH, membrane potential, or any other small molecule which is detectable by a fluorescent probe.

[0953] The following assay uses Fluorometric Imaging Plate Reader (“FLIPR”) to measure changes in fluorescent molecules (Molecular Probes) that bind small molecules. Clearly, any fluorescent molecule detecting a small molecule can be used instead of the calcium fluorescent molecule, fluo4 (Molecular Probes, Inc.; catalog no. F-14202), used here.

[0954] For adherent cells, seed the cells at 10,000-20,000 cells/well in a Co-star black 96-well plate with clear bottom. The plate is incubated in a CO₂ incubator for 20 hours. The adherent cells are washed two times in Biotek washer with 200 ul of HBSS (Hank's Balanced Salt Solution) leaving 100 ul of buffer after the final wash.

[0955] A stock solution of 1 mg/ml fluo-4 is made in 10% pluronic acid DMSO. To load the cells with fluo4, 50 ul of 12 ug/ml fluo4 is added to each well. The plate is incubated at 37 degrees C. in a CO₂ incubator for 60 min. The plate is washed four times in the Biotek washer with HBSS leaving 100 ul of buffer.

[0956] For non-adherent cells, the cells are spun down from culture media. Cells are re-suspended to 2-5×10⁶ cells/ml with BBSS in a 50-ml conical tube. 4 ul of 1 mg/ml fluo-4 solution in 10% pluronic acid DMSO is added to each ml of cell suspension. The tube is then placed in a 37 degrees C. water bath for 30-60 min. The cells are washed twice with HBSS, resuspended to 1×10⁶ cells/ml, and dispensed into a microplate, 100 ul/well. The plate is centrifuged at 1000 rpm for 5 min. The plate is then washed once in Denley Cell Wash with 200 ul, followed by an aspiration step to 100 ul final volume.

[0957] For a non-cell based assay, each well contains a fluorescent molecule, such as fluo-4. The supernatant is added to the well, and a change in fluorescence is detected.

[0958] To measure the fluorescence of intracellular calcium, the FLIPR is set for the following parameters: (1) System gain is 300-800 mW; (2) Exposure time is 0.4 second; (3) Camera F/stop is F/2; (4) Excitation is 488 nm; (5) Emission is 530 nm; and (6) Sample addition is 50 ul. Increased emission at 530 nm indicates an extracellular signaling event caused by the a molecule, either polypeptide of the present invention or a molecule induced by polypeptide of the present invention, which has resulted in an increase in the intracellular Ca⁺⁺ concentration.

### Example 25

### High-Throughput Screening Assay Identifying Tyrosine Kinase Activity

[0959] The Protein Tyrosine Kinases (PIK) represent a diverse group of transmembrane and cytoplasmic linases. Within the Receptor Protein Tyrosine Kinase RPTK) group are receptors for a range of mitogenic and metabolic growth factors including the PDGF, FGF, EGF, NGF, HGF and Insulin receptor subfamilies. In addition there are a large family of RPTKs for which the corresponding ligand is unknown. Ligands for RPTKs include mainly secreted small proteins, but also membrane-bound and extracellular matrix proteins.

[0960] Activation of RPTK by ligands involves ligand-mediated receptor dimerization, resulting in transphosphorylation of the receptor subunits and activation of the cytoplasmic tyrosine kinases. The cytoplasmic tyrosine kinases include receptor associated tyrosine kinases of the src-family (e.g., src, yes, lck, lyn, fyn) and non-receptor linked and cytosolic protein tyrosine kinases, such as the Jak family, members of which mediate signal transduction triggered by the cytokine superfamily of receptors (e.g., the Interleukins, Interferons, GM-CSF, and Leptin).

[0961] Because of the wide range of known factors capable of stimulating tyrosine kinase activity, identifying whether polypeptide of the present invention or a molecule induced by polypeptide of the present invention is capable of activating tyrosine kinase signal transduction pathways is of interest. Therefore, the following protocol is designed to identify such molecules capable of activating the tyrosine kinase signal transduction pathways.

[0962] Seed target cells (e.g., primary keratinocytes) at a density of approximately 25,000 cells per well in a 96 well Loprodyne Silent Screen Plates purchased from Nalge Nunc (Naperville, Ill.). The plates are sterilized with two 30 minute rinses with 100% ethanol, rinsed with water and dried overnight. Some plates are coated for 2 hr with 100 ml of cell culture grade type I collagen (50 mg/ml), gelatin (2%) or polylysine (50 mg/ml), all of which can be purchased from Sigma Chemicals (St. Louis, Mo.) or 10% Matrigel purchased from Becton Dickinson (Bedford, Mass.), or calf serum, rinsed with PBS and stored at 4 degree C. Cell growth on these plates is assayed by seeding 5,000 cells/well in growth medium and indirect quantitation of cell number through use of alamarBlue as described by the manufacturer Alamar Biosciences, Inc. (Sacramento, Calif.) after 48 hr. Falcon plate covers #3071 from Becton Dickinson (Bedford, Mass.) are used to cover the Loprodyne Silent Screen Plates. Falcon Microtest III cell culture plates can also be used in some proliferation experiments.

[0963] To prepare extracts, A431 cells are seeded onto the nylon membranes of Loprodyne plates (20,000/200 ml/well) and cultured overnight in complete medium. Cells are quiesced by incubation in serum-free basal medium for 24 hr. After 5-20 minutes treatment with EGF (60 ng/ml) or 50 ul of the supernatant produced in Example 21, the medium was removed and 100 ml of extraction buffer ((20 mM HEPES pH 7.5, 0.15 M NaCl, 1% Triton X-100, 0.1% SDS, 2 mM Na3VO4, 2 mM Na4P2O7 and a cocktail of protease inhibitors (#1836170) obtained from Boeheringer Mannheim (Indianapolis, Ind.)) is added to each well and the plate is shaken on a rotating shaker for 5 minutes at 4° C. The plate is then placed in a vacuum transfer manifold and the extract filtered through the 0.45 mm membrane bottoms of each well using house vacuum. Extracts are collected in a 96-well catch/assay plate in the bottom of the vacuum manifold and immediately placed on ice. To obtain extracts clarified by centrifugation, the content of each well, after detergent solubilization for 5 minutes, is removed and centrifuged for 15 minutes at 4 degree C. at 16,000× g.

[0964] Test the filtered extracts for levels of tyrosine kinase activity. Although many methods of detecting tyrosine kinase activity are known, one method is described here.

[0965] Generally, the tyrosine kinase activity of a supernatant is evaluated by determining its ability to phosphorylate a tyrosine residue on a specific substrate (a biotinylated peptide). Biotinylated peptides that can be used for this purpose include PSK1 (corresponding to amino acids 6-20 of the cell division kinase cdc2-p34) and PSK2 (corresponding to amino acids 1-17 of gastrin). Both peptides are substrates for a range of tyrosine kinases and are available from Boehringer Mannheim.

[0966] The tyrosine kinase reaction is set up by adding the following components in order. First, add 10 ul of 5× Biotinylated Peptide, then 10 ul ATP/Mg₂₊ (5 mM ATP/50 mM MgCl₂), then 10 ul of 5× Assay Buffer (40 mM imidazole hydrochloride, pH 7.3, 40 mM beta-glycerophosphate, 1 mM EGTA, 100 mM MgCl₂, 5 mM MnCl₂, 0.5 mg/ml BSA), then 5 ul of Sodium Vanadate(1 mM), and then 5 ul of water. Mix the components gently and preincubate the reaction mix at 30 degree C. for 2 min. Initial the reaction by adding 10 ul of the control enzyme or the filtered supernatant.

[0967] The tyrosine kinase assay reaction is then terminated by adding 10 ul of 120 mm EDTA and place the reactions on ice.

[0968] Tyrosine kinase activity is determined by transferring 50 ul aliquot of reaction mixture to a microtiter plate (MTP) module and incubating at 37 degree C. for 20 min. This allows the streptavidincoated 96 well plate to associate with the biotinylated peptide. Wash the MTP module with 300 ul/well of PBS four times. Next add 75 ul of anti-phospotyrosine antibody conjugated to horse radish peiroxidase(anti-P-Tyr-POD(0.5 u/ml)) to each well and incubate at 37 degree C. for one hour. Wash the well as above.

[0969] Next add 100 ul of peroxidase substrate solution (Boehringer Mannheim) and incubate at room temperature for at least 5 mins (up to 30 min). Measure the absorbance of the sample at 405 nm by using ELISA reader. The level of bound peroxidase activity is quantitated using an ELISA reader and reflects the level of tyrosine kinase activity.

### Example 26

### High-Throughput Screening Assay Identifying Phosphorylation Activity

[0970] As a potential alternative and/or complement to the assay of protein tyrosine kinase activity described in Example 25, an assay which detects activation (phosphorylation) of major intracellular signal transduction intermediates can also be used. For example, as described below one particular assay can detect tyrosine phosphorylation of the Erk-1 and Erk-2 kinases. However, phosphorylation of other molecules, such as Raf, JNK, p38 MAP, Map kinase kinase (MEK), MEK kinase, Src, Muscle specific kinase (MuSK), IRAK, Tec, and Janus, as well as any other phosphoserine, phosphotyrosine, or phosphothreonine molecule, can be detected by substituting these molecules for Erk-1 or Erk-2 in the following assay.

[0971] Specifically, assay plates are made by coating the wells of a 96-well ELISA plate with 0.1 ml of protein G (1 ug/ml) for 2 hr at room temp, (RT). The plates are then rinsed with PBS and blocked with 3% BSA/PBS for 1 hr at RT. The protein G plates are then treated with 2 commercial monoclonal antibodies (100 ng/well) against Erk-1 and Erk-2 (1 hr at RT) (Santa Cruz Biotechnology). (To detect other molecules, this step can easily be modified by substituting a monoclonal antibody detecting any of the above described molecules.) After 3-5 rinses with PBS, the plates are stored at 4 degree C. until use.

[0972] A431 cells are seeded at 20,000/well in a 96-well Loprodyne filterplate and cultured overnight in growth medium. The cells are then starved for 48 hr in basal medium (DMEM) and then treated with EGF (6 ng/well) or 50 ul of the supernatants obtained in Example 21 for 5-20 minutes. The cells are then solubilized and extracts filtered directly into the assay plate.

[0973] After incubation with the extract for 1 hr at RT, the wells are again rinsed. As a positive control, a commercial preparation of MAP kinase (10 ng/well) is used in place of A431 extract. Plates are then treated with a commercial polyclonal (rabbit) antibody (1 ug/ml) which specifically recognizes the phosphorylated epitope of the Erk-1 and Erk-2 kinases (1 hr at RT). This antibody is biotinylated by standard procedures. The bound polyclonal antibody is then quantitated by successive incubations with Europium-streptavidin and Europium fluorescence enhancing reagent in the Wallac DELFIA instrument (time-resolved fluorescence). An increased fluorescent signal over background indicates a phosphorylation by polypeptide of the present invention or a molecule induced by polypeptide of the present invention.

### Example 27

### Cellular Adhesion Molecule (CAM) Expression on Endothelial Cells

[0974] The recruitment of lymphocytes to areas of inflammation and angiogenesis involves specific receptor-ligand interactions between cell surface adhesion molecules (CAMs) on lymphocytes and the vascular endothelium. The adhesion process, in both normal and pathological settings, follows a multi-step cascade that involves intercellular adhesion molecule-1 (ICAM-1), vascular cell adhesion molecule-1 (VCAM-1), and endothelial leukocyte adhesion molecule-1 (E-selectin) expression on endothelial cells (EC). The expression of these molecules and others on the vascular endothelium determines the efficiency with which leukocytes may adhere to the local vasculature and extravasate into the local tissue during the development of an inflammatory response. The local concentration of cytokines and growth factor participate in the modulation of the expression of these CAMs.

[0975] Briefly, endothelial cells (e.g., Human Umbilical Vein Endothelial cells (HUVECs)) are grown in a standard 96 well plate to confluence, growth medium is removed from the cells and replaced with 100 μl of 199 Medium (10% fetal bovine serum (FBS)). Samples for testing and positive or negative controls are added to the plate in triplicate (in 10 μl volumes). Plates are then incubated at 37° C. for either 5 h (selectin and integrin expression) or 24 h (integrin expression only). Plates are aspirated to remove medium and 100 μl of 0.1% paraformaldehyde-PBS(with Ca++ and Mg++) is added to each well. Plates are held at 4° C. for 30 min. Fixative is removed from the wells and wells are washed 1× with PBS(+Ca, Mg)+0.5% BSA and drained. 10 μl of diluted primary antibody is added to the test and control wells. Anti-ICAM-1-Biotin, Anti-VCAM-1-Biotin and Anti-E-selectin-Biotin are used at a concentration of 10 μg/ml (1:10 dilution of 0.1 mg/ml stock antibody). Cells are incubated at 37° C. for 30 min. in a humidified environment. Wells are washed three times with PBS(+Ca, Mg)+0.5% BSA. 20 μl of diluted ExtrAvidin-Alkaline Phosphatase (1:5,000 dilution, referred to herein as the working dilution) are added to each well and incubated at 37° C. for 30 min. Wells are washed three times with PBS(+Ca, Mg)+0.5% BSA. Dissolve 1 tablet of p-Nitrophenol Phosphate pNPP per 5 ml of glycine buffer (pH 10.4). 100 μl of pNPP substrate in glycine buffer is added to each test well. Standard wells in triplicate are prepared from the working dilution of the ExtrAvidin-Alkaline Phosphotase in glycine buffer: 1:5,000 (10⁰)>10^{-0.5}>10⁻¹>10^{-1.5}0.5 μof each dilution is added to triplicate wells and the resulting AP content in each well is 5.50 ng, 1.74 ng, 0.55 ng, 0.18 ng. 100 μl of pNNP reagent is then added to each of the standard wells. The plate is incubated at 37° C. for 4 h. A volume of 50 μl of 3M NaOH is added to all wells. The plate is read on a plate reader at 405 nm using the background subtraction option on blank wells filled with glycine buffer only. Additionally, the template is set up to indicate the concentration of APconjugate in each standard well [5.50 ng; 1.74 ng; 0.55 ng; 0.18 ng]. Results are indicated as amount of bound AP-conjugate in each sample.

### Example 28

### Alamar Blue Endothelial Cells Proliferation Assay

[0976] This assay may be used to quantitatively determine protein mediated inhibition of bFGF-induced proliferation of Bovine Lymphatic Endothelial Cells (LECs), Bovine Aortic Endothelial Cells (BAECs) or Human Microvascular Uterine Myometrial Cells (UTMECs). This assay incorporates a fluorometric growth indicator based on detection of metabolic activity. A standard Alamar Blue Proliferation Assay is prepared in EGM-2MV with 10 ng /ml of bFGF added as a source of endothelial cell stimulation. This assay may be used with a variety of endothelial cells with slight changes in growth medium and cell concentration. Dilutions of the protein batches to be tested are diluted as appropriate. Serum-free medium (GIBCO SFM) without bFGF is used as a non-stimulated control and Angiostatin or TSP-1 are included as a known inhibitory controls.

[0977] Briefly, LEC, BAECs or UTMECs are seeded in growth media at a density of 5000 to 2000 cells/well in a 96 well plate and placed at 37 degrees C. overnight. After the overnight incubation of the cells, the growth media is removed and replaced with GIBCO EC-SFM. The cells are treated with the appropriate dilutions of the protein of interest or control protein sample(s) (prepared in SFM ) in triplicate wells with additional bFGF to a concentration of 10 ng/ml. Once the cells have been treated with the samples, the plate(s) is/are placed back in the 37° C. incubator for three days. After three days 10 ml of stock alamar blue (Biosource Cat# DAL1100) is added to each well and the plate(s) is/are placed back in the 37° C. incubator for four hours. The plate(s) are then read at 530 nm excitation and 590 nm emission using the CytoFluor fluorescence reader. Direct output is recorded in relative fluorescence units.

[0978] Alamar blue is an oxidation-reduction indicator that both fluoresces and changes color in response to chemical reduction of growth medium resulting from cell growth. As cells grow in culture, innate metabolic activity results in a chemical reduction of the immediate surrounding environment. Reduction related to growth causes the indicator to change from oxidized (non-fluorescent blue) form to reduced (fluorescent red) form (i.e., stimulated proliferation will produce a stronger signal and inhibited proliferation will produce a weaker signal and the total signal is proportional to the total number of cells as well as their metabolic activity). The background level of activity is observed with the starvation medium alone. This is compared to the output observed from the positive control samples (bFGF in growth medium) and protein dilutions.

### Example 29

### Detection of Inhibition of a Mixed Lymphocyte Reaction

[0979] This assay can be used to detect and evaluate inhibition of a Mixed Lymphocyte Reaction (MLR) by gene products (e.g., isolated polypeptides). Inhibition of a MLR may be due to a direct effect on cell proliferation and viability, modulation of costimulatory molecules on interacting cells, modulation of adhesiveness between lymphocytes and accessory cells, or modulation of cytokine production by accessory cells. Multiple cells may be targeted by these polypeptides since the peripheral blood mononuclear fraction used in this assay includes T, B and natural killer lymphocytes, as well as monocytes and dendritic cells.

[0980] Polypeptides of interest found to inhibit the MLR may find application in diseases associated with lymphocyte and monocyte activation or proliferation. These include, but are not limited to, diseases such as asthma, arthritis, diabetes, inflammatory skin conditions, psoriasis, eczema, systemic lupus erythematosus, multiple sclerosis, glomerulonephritis, inflammatory bowel disease, crohn's disease, ulcerative colitis, arteriosclerosis, cirrhosis, graft vs. host disease, host vs. graft disease, hepatitis, leukemia and lymphoma.

[0981] Briefly, PBMCs from human donors are purified by density gradient centrifugation using Lymphocyte Separation Medium (LSM®, density 1.0770 g/ml, Organon Teknika Corporation, West Chester, Pa.). PBMCs from two donors are adjusted to 2×10⁶ cells/ml in RPMI-1640 (Life Technologies, Grand Island, N.Y.) supplemented with 10% FCS and 2 mM glutamine. PBMCs from a third donor is adjusted to 2×10⁵ cells/ml. Fifty microliters of PBMCs from each donor is added to wells of a 96-well round bottom microtiter plate. Dilutions of test materials (50 μl) is added in triplicate to microtiter wells. Test samples (of the protein of interest) are added for final dilution of 1:4; rhuIL-2 (R&D Systems, Minneapolis, Minn., catalog number 202-IL) is added to a final concentration of 1 μg/ml; anti-CD4 mAb (R&D Systems, clone 34930.11, catalog number MAB379) is added to a final concentration of 10 μg/ml. Cells are cultured for 7-8 days at 37° C. in 5% CO₂, and 1 μC of [³H] thymidine is added to wells for the last 16 hrs of culture. Cells are harvested and thymidine incorporation determined using a Packard TopCount. Data is expressed as the mean and standard deviation of triplicate determinations.

[0982] Samples of the protein of interest are screened in separate experiments and compared to the negative control treatment, anti-CD4 mAb, which inhibits proliferation of lymphocytes and the positive control treatment, IL-2 (either as recombinant material or supernatant), which enhances proliferation of lymphocytes.

[0983] One skilled in the art could easily modify the exemplified studies to test the activity of polynucleotides (e.g., gene therapy), antibodies, agonists, and/or antagonists and fragments and variants thereof.

### Example 30

### Assays for Protease Activity

[0984] The following assay may be used to assess protease activity of the polypeptides of the invention.

[0985] Gelatin and casein zymography are performed essentially as described (Heusen et al., Anal. Biochem, 102:196-202 (1980); Wilson et al., Journal of Urology, 149:653-658 (1993)). Samples are run on 10% polyacryamide/0.1% SDS gels containing 1% gelain orcasein, soaked in 2.5% triton at room temperature for 1 hour, and in 0.1M glycine, pH 8.3 at 37° C. 5 to 16 hours. After staining in amido black areas of proteolysis apear as clear areas agains the blue-black background. Trypsin (Sigma T8642) is used as a positive control.

[0986] Protease activity is also determined by monitoring the cleavage of n-a-benzoyl-L-arginine ethyl ester (BAEE) (Sigma B4500. Reactions are set up in (25 mM NaPO₄, 1 mM EDTA, and 1 mM BAEE), pH 7.5. Samples are added and the change in adsorbance at 260 nm is monitored on the Beckman DU-6 spectrophotometer in the time-drive mode; Trypsin is used as a positive control.

[0987] Additional assays based upon the release of acid-soluble peptides from casein or hemoglobin measured as adsorbance at 280 nm or calorimetrically using the Folin method are performed as described in Bergmeyer, et al., Methods of Enzymatic Analysis, 5 (1984). Other assays involve the solubilization of chromogenic substrates (Ward, Applied Science, 251-317 (1983)).

### Example 31

### Identifying Sertine Protease Substrate Specificity

[0988] Methods known in the art or described herein may be used to determine the substrate specificity of the polypeptides of the present invention having serine protease activity. A preferred method of determining substrate specificity is by the use of positional scanning synthetic combinatorial libraries as described in GB 2 324 529 (incorporated herein in its entirety).

### Example 32

### Ligand Binding Assays

[0989] The following assay may be used to assess ligand binding activity of the polypeptides of the invention.

[0990] Ligand binding assays provide a direct method for ascertaining receptor pharmacology and are adaptable to a high throughput format. The purified ligand for a polypeptide is radiolabeled to high specific activity (50-2000 Ci/mmol) for binding studies. A determination is then made that the process of radiolabeling does not diminish the activity of the ligand towards its polypeptide. Assay conditions for buffers, ions, pH and other modulators such as nucleotides are optimized to establish a workable signal to noise ratio for both membrane and whole cell polypeptide sources. For these assays, specific polypeptide binding is defined as total associated radioactivity minus the radioactivity measured in the presence of an excess of unlabeled competing ligand. Where possible, more than one competing ligand is used to define residual nonspecific binding.

### Example 33

### Functional Assay in Xenopus Oocytes

[0991] Capped RNA transcripts from linearized plasmid templates encoding the polypeptides of the invention are synthesized in vitro with RNA polymerases in accordance with standard procedures. In vitro transcripts are suspended in water at a final concentration of 0.2 mg/mi. Ovarian lobes are removed from adult female toads, Stage V defolliculated oocytes are obtained, and RNA transcripts (10 ng/oocyte) are injected in a 50 nl bolus using a microinjection apparatus. Two electrode voltage clamps are used to measure the currents from individual Xenopus oocytes in response polypeptides and polypeptide agonist exposure. Recordings are made in Ca2+ free Barth's medium at room temperature. The Xenopus system can be used to screen known ligands and tissue/cell extracts for activating ligands.

### Example 34

### Microphysiometric Assays

[0992] Activation of a wide variety of secondary messenger systems results in extrusion of small amounts of acid from a cell. The acid formed is largely as a result of the increased metabolic activity required to fuel the intracellular signaling process. The pH changes in the media surrounding the cell are very small but are detectable by the CYTOSENSOR microphysiometer (Molecular Devices Ltd., Menlo Park, Calif.). The CYTOSENSOR is thus capable of detecting the activation of polypeptide which is coupled to an energy utilizing intracellular signaling pathway.

### Example 35

### Extract/Cell Supernatant Screening

[0993] A large number of mammalian receptors exist for which there remains, as yet, no cognate activating ligand (agonist). Thus, active ligands for these receptors may not be included within the ligands banks as identified to date. Accordingly, the polypeptides of the invention can also be functionally screened (using calcium, cAMP, microphysiometer, oocyte electrophysiology, etc., functional screens) against tissue extracts to identify its natural ligands. Extracts that produce positive functional responses can be sequentially subfractionated until an activating ligand is isolated and identified.

### Example 36

### Calcium and cAMP Functional Assays

[0994] Seven transmembrane receptors which are expressed in HEK 293 cells have been shown to be coupled functionally to activation of PLC and calcium mobilization and/or cAMP stimulation or inhibition. Basal calcium levels in the HEK 293 cells in receptor-transfected or vector control cells were observed to be in the normal, 100 nM to 200 nM, range. HEK 293 cells expressing recombinant receptors are loaded with fura 2 and in a single day >150 selected ligands or tissue/cell extracts are evaluated for agonist induced calcium mobilization. Similarly, HEK 293 cells expressing recombinant receptors are evaluated for the stimulation or inhibition of cAMP production using standard cAMP quantitation assays. Agonists presenting a calcium transient or cAMP fluctuation are tested in vector control cells to determine if the response is unique to the transfected cells expressing receptor.

### Example 37

### ATP-Binding Assay

[0995] The following assay may be used to assess ATP-binding activity of polypeptides of the invention.

[0996] ATP-binding activity of the polypeptides of the invention may be detected using the ATP-binding assay described in U.S. Pat. No. 5,858,719, which is herein incorporated by reference in its entirety. Briefly, ATP-binding to polypeptides of the invention is measured via photoaffinity labeling with 8-azido-ATP in a competition assay. Reaction mixtures containing 1 mg/ml of the ABC transport protein of the present invention are incubated with varying concentrations of ATP, or the non-hydrolyzable ATP analog adenyl-5′-imidodiphosphate for 10 minutes at 4° C. A mixture of 8-azido-ATP (Sigma Chem. Corp., St. Louis, Mo.) plus 8-azido-ATP (³²P-ATP) (5 mCi/μmol, ICN, Irvine Calif.) is added to a final concentration of 100 μM and 0.5 ml aliquots are placed in the wells of a porcelain spot plate on ice. The plate is irradiated using a short wave 254 nm UV lamp at a distance of 2.5 cm from the plate for two one-minute intervals with a one-minute cooling interval in between. The reaction is stopped by addition of dithiothreitol to a final concentration of 2 mM. The incubations are subjected to SDS-PAGE electrophoresis, dried, and autoradiographed. Protein bands corresponding to the particular polypeptides of the invention are excised, and the radioactivity quantified. A decrease in radioactivity with increasing ATP or adenly-5′-imidodiphosphate provides a measure of ATP affinity to the polypeptides.

### Example 38

### Small Molecule Screening

[0997] This invention is particularly useful for screening therapeutic compounds by using the polypeptides of the invention, or binding fragments thereof, in any of a variety of drug screening techniques. The polypeptide or fragment employed in such a test may be affixed to a solid support, expressed on a cell surface, free in solution, or located intracellularly. One method of drug screening utilizes eukaryotic or prokaryotic host cells which are stably transformed with recombinant nucleic acids expressing the polypeptide or fragment. Drugs are screened against such transformed cells in competitive binding assays. One may measure, for example, the formulation of complexes between the agent being tested and polypeptide of the invention.

[0998] Thus, the present invention provides methods of screening for drugs or any other agents which affect activities mediated by the polypeptides of the invention. These methods comprise contacting such an agent with a polypeptide of the invention or fragment thereof and assaying for the presence of a complex between the agent and the polypeptide or fragment thereof, by methods well known in the art. In such a competitive binding assay, the agents to screen are typically labeled. Following incubation, free agent is separated from that present in bound form, and the amount of free or uncomplexed label is a measure of the ability of a particular agent to bind to the polypeptides of the invention.

[0999] Another technique for drug screening provides high throughput screening for compounds having suitable binding affinity to the polypeptides of the invention, and is described in great detail in European Patent Application 84/03564, published on Sep. 13, 1984, which is herein incorporated by reference in its entirety. Briefly stated, large numbers of different small molecule test compounds are synthesized on a solid substrate, such as plastic pins or some other surface. The test compounds are reacted with polypeptides of the invention and washed. Bound polypeptides are then detected by methods well known in the art. Purified polypeptides are coated directly onto plates for use in the aforementioned drug screening techniques. In addition, non-neutralizing antibodies may be used to capture the peptide and immobilize it on the solid support.

[1000] This invention also contemplates the use of competitive drug screening assays in which neutralizing antibodies capable of binding polypeptides of the invention specifically compete with a test compound for binding to the polypeptides or fragments thereof. In this manner, the antibodies are used to detect the presence of any peptide which shares one or more antigenic epitopes with a polypeptide of the invention.

### Example 39

### Phosphorylation Assay

[1001] In order to assay for phosphorylation activity of the polypeptides of the invention, a phosphorylation assay as described in U.S. Pat. No. 5,958,405 (which is herein incorporated by reference) is utilized. Briefly, phosphorylation activity may be measured by phosphorylation of a protein substrate using gamma-labeled ³²P-ATP and quantitation of the incorporated radioactivity using a gamma radioisotope counter. The polypeptides of the invention are incubated with the protein substrate, ³²P-ATP, and a kinase buffer. The ³²P incorporated into the substrate is then separated from free ³²P-ATP by electrophoresis, and the incorporated ³²P is counted and compared to a negative control. Radioactivity counts above the negative control are indicative of phosphorylation activity of the polypeptides of the invention.

### Example 40

### Detection of Phosphorylation Activity (Activation) of the Polypeptides of the Invention in the Presence of Polypeptide Ligands

[1002] Methods known in the art or described herein may be used to determine the phosphorylation activity of the polypeptides of the invention. A preferred method of determining phosphorylation activity is by the use of the tyrosine phosphorylation assay as described in U.S. Pat. No. 5,817,471 (incorporated herein by reference).

### Example 41

### Identification of Signal Transduction Proteins that Interact with Polypeptides of the Present Invention

[1003] The purified polypeptides of the invention are research tools for the identification, characterization and purification of additional signal transduction pathway proteins or receptor proteins. Briefly, labeled polypeptides of the invention are useful as reagents for the purification of molecules with which it interacts. In one embodiment of affinity purification, polypeptides of the invention are covalently coupled to a chromatography column. Cell-free extract derived from putative target cells, such as carcinoma tissues, is passed over the column, and molecules with appropriate affinity bind to the polypeptides of the invention. The protein complex is recovered from the column, dissociated, and the recovered molecule subjected to N-terminal protein sequencing. This amino acid sequence is then used to identify the captured molecule or to design degenerate oligonucleotide probes for cloning the relevant gene from an appropriate cDNA library.

### Example 42

### Assay for Phosphatase Activity

[1004] The following assay may be used to assess serine/threonine phosphatase (PTPase) activity of the polypeptides of the invention.

[1005] In order to assay for serine/threonine phosphatase (PTPase) activity, assays can be utilized which are widely known to those skilled in the art. For example, the serine/threonine phosphatase (PSPase) activity is measured using a PSPase assay kit from New England Biolabs, Inc. Myelin basic protein (MyBP), a substrate for PSPase, is phosphorylated on serine and threonine residues with cAMP-dependent Protein Kinase in the presence of [³²P]ATP. Protein serine/threonine phosphatase activity is then determined by measuring the release of inorganic phosphate from 32P-labeled MyBP.

### Example 43

### Interaction of Serine/Threonine Phosphatases with Other Proteins

[1006] The polypeptides of the invention with serine/threonine phosphatase activity as determined in Example 42 are research tools for the identification, characterization and purification of additional interacting proteins or receptor proteins, or other signal transduction pathway proteins. Briefly, labeled polypeptide(s) of the invention is useful as a reagent for the purification of molecules with which it interacts. In one embodiment of affinity purification, polypeptide of the invention is covalently coupled to a chromatography column. Cell-free extract derived from putative target cells, such as neural or liver cells, is passed over the column, and molecules with appropriate affinity bind to the polypeptides of the invention. The polypeptides of the invention-complex is recovered from the column, dissociated, and the recovered molecule subjected to N-terminal protein sequencing. This amino acid sequence is then used to identify the captured molecule or to design degenerate oligonucleotide probes for cloning the relevant gene from an appropriate cDNA library.

### Example 44

### Assaying for Heparanase Activity

[1007] In order to assay for heparanase activity of the polypeptides of the invention, the heparanase assay described by Vlodavsky et al is utilized (Vlodavsky, I., et al., Nat. Med., 5:793-802 (1999)). Briefly, cell lysates, conditioned media or intact cells (1×10⁶ cells per 35-mm dish) are incubated for 18 hrs at 37° C., pH 6.2-6.6, with ³⁵S-labeled ECM or soluble ECM derived peak I proteoglycans. The incubation medium is centrifuged and the supernatant is analyzed by gel filtration on a Sepharose CL-6B column (0.9×30 cm). Fractions are eluted with PBS and their radioactivity is measured. Degradation fragments of heparan sulfate side chains are eluted from Sepharose 6B at 0.5<Kₐᵥ<0.8 (peak II). Each experiment is done at least three times. Degradation fragments corresponding to “peak II,” as described by Vlodavsky et al., is indicative of the activity of the polypeptides of the invention in cleaving heparan sulfate.

### Example 45

### Immobilization of Biomolecules

[1008] This example provides a method for the stabilization of polypeptides of the invention in non-host cell lipid bilayer constucts (see, e.g., Bieri et al., Nature Biotech 17:1105-1108 (1999), hereby incorporated by reference in its entirety herein) which can be adapted for the study of polypeptides of the invention in the various functional assays described above. Briefly, carbohydrate-specific chemistry for biotinylation is used to confine a biotin tag to the extracellular domain of the polypeptides of the invention, thus allowing uniform orientation upon immobilization. A 50 uM solution of polypeptides of the invention in washed membranes is incubated with 20 mM NaIO4 and 1.5 mg/ml (4 mM) BACH or 2 mg/ml (7.5 mM) biotin-hydrazide for 1 hr at room temperature (reaction volume, 150 ul). Then the sample is dialyzed (Pierce Slidealizer Cassett, 10 kDa cutoff; Pierce Chemical Co., Rockford Ill.) at 4 C first for 5 h, exchanging the buffer after each hour, and finally for 12 h against 500 ml buffer R (0.15 M NaCl, 1 mM MgCl2, 10 mM sodium phosphate, pH7). Just before addition into a cuvette, the sample is diluted 1:5 in buffer ROG50 (Buffer R supplemented with 50 mM octylglucoside).

### Example 46

### TAQMAN

[1009] Quantitative PCR (QPCR). Total RNA from cells in culture are extracted by Trizol separation as recommended by the supplier (LifeTechnologies). (Total RNA is treated with DNase I (Life Technologies) to remove any contaminating genomic DNA before reverse transcription.) Total RNA (50 ng) is used in a one-step, 50 ul, RT-QPCR, consisting of Taqman Buffer A (Perkin-Elmer; 50 mM KCl/10 mM Tris, pH 8.3), 5.5 MM MgCl₂, 240 μM each dNTP, 0.4 units RNase inhibitor(Promega), 8% glycerol, 0.012% Tween-20, 0.05% gelatin, 0.3 uM primers, 0.1 uM probe, 0.025 units Amplitaq Gold (Perlin-Elmer) and 2.5 units Superscript II reverse transcriptase (Life Technologies). As a control for genomic contarmination, parallel reactions are setup without reverse transcriptase. The relative abundance of (unknown) and 18S RNAs are assessed by using the Applied Biosystems Prism 7700 Sequence Detection System (Livak, K. J., Flood, S. J., Marmaro, J., Giusti, W. & Deetz, K. (1995) PCR Methods Appl. 4, 357-362). Reactions are carried out at 48° C. for 30 min, 95° C. for 10 min, followed by 40 cycles of 95° C. for 1 min. Reactions are performed in triplicate.

[1010] Primers (f & r) and FRET probes sets are designed using Primer Express Software (Perkin-Elmer). Probes are labeled at the 5′-end with the reporter dye 6-FAM and on the 3′-end with the quencher dye TAMRA (Biosource International, Camarillo, Calif. or Perkin-Elmer).

### Example 47

### Assays for Metalloproteinase Activity

[1011] Metalloproteinases (EC 3.4.24.-) are peptide hydrolases which use metal ions, such as Zn²⁺, as the catalytic mechanism. Metalloproteinase activity of polypeptides of the present invention can be assayed according to the following methods.

[1012] Proteolysis of Alpha-2-Macroglobulin

[1013] To confirm protease activity, purified polypeptides of the invention are mixed with the substrate alpha-2-macroglobulin (0.2 unit/ml; Boehringer Mannheim, Germany) in 1× assay buffer (50 mM HEPES, pH 7.5, 0.2 M NaCl, 10 mM CaCl₂, 25 μM ZnCl₂ and 0.05% Brij-35) and incubated at 37° C. for 1-5 days. Trypsin is used as positive control. Negative controls contain only alpha-2-macroglobulin in assay buffer. The samples are collected and boiled in SDS-PAGE sample buffer containing 5% 2-mercaptoethanol for 5-min, then loaded onto 8% SDS-polyacrylamide gel. After electrophoresis the proteins are visualized by silver staining. Proteolysis is evident by the appearance of lower molecular weight bands as compared to the negative control.

[1014] Inhibition of Alpha-2-Macroglobulin Proteolysis by Inhibitors of Metalloproteintases

[1015] Known metalloproteinase inhibitors (metal chelators (EDTA, EGTA, AND HgCl₂), peptide metalloproteinase inhibitors (TIMP-1 and TIMP-2), and commercial small molecule MMP inhibitors) are used to characterize the proteolytic activity of polypeptides of the invention. The three synthetic MMP inhibitors used are: MMP inhibitor I, [IC₅₀=1.0 μM against MMP-1 and MMP-8; IC₅₀=30 μM against MMP-9; IC₅₀=150 μM against MMP-3]; MMP-3 (stromelysin-1) inhibitor I [IC₅₀=5 μM against MMP-3], and MMP-3 inhibitor II [Kᵢ=130 nM against MMP-3]; inhibitors available through Calbiochem, catalog #444250, 444218, and 444225, respectively). Briefly, different concentrations of the small molecule MMP inhibitors are mixed with purified polypeptides of the invention (50 μg/ml) in 22.9 μl of 1× HEPES buffer (50 mM HEPES, pH 7.5, 0.2 M NaCl, 10 mM CaCl₂, 25 μM ZnCl₂ and 0.05% Brij-35) and incubated at room temperature (24° C.) for 2-hr, then 7.1 μl of substrate alpha-2-macroglobulin (0.2 unit/ml) is added and incubated at 37° C. for 20-hr. The reactions are stopped by adding 4x sample buffer and boiled immediately for 5 minutes. After SDS-PAGE, the protein bands are visualized by silver stain.

[1016] Synthetic Fluorogenic Peptide Substrates Cleavage Assay

[1017] The substrate specificity for polypeptides of the invention with demonstrated metalloproteinase activity can be determined using synthetic fluorogenic peptide substrates (purchased from BACHEM Bioscience Inc). Test substrates include, M-1985, M-2225, M-2105, M-2110, and M-2255. The first four are MMP substrates and the last one is a substrate of tumor necrosis factor-α (TNF-α) converting enzyme (TACE). All the substrates are prepared in 1:1 dimethyl sulfoxide (DMSO) and water. The stock solutions are 50-500 μM. Fluorescent assays are performed by using a Perkin Elmer LS 50B luminescence spectrometer equipped with a constant temperature water bath. The excitation λ is 328 nm and the emission λ is 393 nm. Briefly, the assay is carried out by incubating 176 μl 1× HEPES buffer (0.2 M NaCl, 10 mM CaCl₂, 0.05% Brij-35 and 50 mM HEPES, pH 7.5) with 4 μl of substrate solution (50 μM) at 25° C. for 15 minutes, and then adding 20 μl of a purified polypeptide of the invention into the assay cuvett. The final concentration of substrate is 1 μM. Initial hydrolysis rates are monitored for 30-min.

### Example 48

### Characterization of the cDNA Contained in a Deposited Plasmid

[1018] The size of the cDNA insert contained in a deposited plasmid may be routinely determined using techniques known in the art, such as PCR amplification using synthetic primers hybridizable to the 3′ and 5′ ends of the cDNA sequence. For example, two primers of 17-30 nucleotides derived from each end of the cDNA (i.e., hybridizable to the absolute 5′ nucleotide or the 340 nucleotide end of the sequence of SEQ ID NO:X, respectively) are synthesized and used to amplify the cDNA using the deposited cDNA plasmid as a template. The polymerase chain reaction is carried out under routine conditions, for instance, in 25 ul of reaction mixture with 0.5 ug of the above cDNA template. A convenient reaction mixture is 1.5-5 mM MgCl₂, 0.01% (w/v) gelatin, 20 uM each of dATP, dCTP, dGTP, dTTP, 25 pmol of each primer and 0.25 Unit of Taq polymerase. Thirty five cycles of PCR (denaturation at 94 degree C. for 1 min; annealing at 55 degree C. for 1 min; elongation at 72 degree C. for 1 min) are performed with a Perkin-Elmer Cetus automated thermal cycler. The amplified product is analyzed by agarose gel electrophoresis. The PCR product is verified to be the selected sequence by subcloning and sequencing the DNA product. It will be clear that the invention may be practiced otherwise than as particularly described in the foregoing description and examples. Numerous modifications and variations of the present invention are possible in light of the above teachings and, therefore, are within the scope of the appended claims.

Incorporation by Reference

[1019] The entire disclosure of each document cited (including patents, patent applications, journal articles, abstracts, laboratory manuals, books, or other disclosures) in the Background of the Invention, Detailed Description, and Examples is hereby incorporated herein by reference. In addition, the sequence listing submitted herewith is incorporated herein by reference in its entirety. The specification and sequence listing of each of the following U.S. and PCT applications are herein incorporated by reference in their entirety: U.S. Appln. No. 60/040,162 filed on 7 Mar. 1997, U.S. Appln. No. 60/043,576 filed on 11 Apr. 1997, U.S. Appln. No. 60/047,601 filed on 23 May 1997, U.S. Appln. No. 60/056,845 filed on 22 Aug. 1997, U.S. Appln. No. 60/043,580 filed on 11 Apr, 1997, U.S. Appln. No. 60/047,599 filed on 23 May 1997, U.S. Appln. No. 60/056,664 filed on 22 Aug. 1997, U.S. Appln. No. 60/043,314 filed on 11 Apr, 1997, U.S. Appln. No. 60/047,632 filed on 23 May 1997, U.S. Appln. No. 60/056,892 filed on 22 Aug. 1997, U.S. Appln. No. 60/043,568 filed on 11 Apr, 1997, U.S. Appln. No. 60/047,595 filed on 23 May 1997, U.S. Appln. No. 60/056,632 filed on 22 Aug. 1997, U.S. Appln. No. 60/043,578 filed on 11 Apr, 1997, U.S. Appln. No. 60/040,333 filed on 7 Mar. 1997, U.S. Appln. No. 60/043,670 filed on 11 Apr. 1997, U.S. Appln. No. 60/047,596 filed on 23 May 1997, U.S. Appln. No. 60/056,864 filed on 22 Aug. 1997, U.S. Appln. No. 60/043,674 filed on 11 Apr, 1997, U.S. Appln. No. 60/047,612 filed on 23 May 1997, U.S. Appln. No. 60/056,631 filed on 22 Aug. 1997, U.S. Appln. No. 60/043,569 filed on 11 Apr, 1997, U.S. Appln. No. 60/047,588 filed on 23 May 1997, U.S. Appln. No. 60/056,876 filed on 22 Aug. 1997, U.S. Appln. No. 60/043,671 filed on 11 Apr, 1997, U.S. Appln. No. 60/043,311 filed on 11 Apr, 1997, U.S. Appln. No. 60/038,621 filed on 7 Mar. 1997, U.S. Appln. No. 60/043,672 filed on 11 Apr, 1997, U.S. Appln. No. 60/047,613 filed on 23 May 1997, U.S. Appln. No. 60/056,636 filed on 22 Aug. 1997, U.S. Appln. No. 60/043,669 filed on 11 Apr. 1997, U.S. Appln. No. 60/047,582 filed on 23 May 1997, U.S. Appln. No. 60/056,910 filed on 22 Aug. 1997, U.S. Appln. No. 60/043,315 filed on 11 Apr, 1997, U.S. Appln. No. 60/047,598 filed on 23 May 1997, U.S. Appln. No. 60/056,874 filed on 22 Aug. 1997, U.S. Appln. No. 60/043,312 filed on 11 Apr, 1997, U.S. Appln. No. 60/047,585 filed on 23 May 1997, U.S. Appln. No. 60/056,881 filed on 22 Aug. 1997, U.S. Appln. No. 60/043,313 filed on 11 Apr, 1997, U.S. Appln. No. 60/047,586 filed on 23 May 1997, U.S. Appln. No. 60/056,909 filed on 22 Aug. 1997, U.S. Appln. No. 60/040,161 filed on 7 Mar. 1997, U.S. Appln. No. 60/047,587 filed on 23 May 1997, U.S. Appln. No. 60/056,879 filed on 22 Aug. 1997, U.S. Appln. No. 60/047,500 filed on 23 May 1997, U.S. Appln. No. 60/056,880 filed on 22 Aug. 1997, U.S. Appln. No. 60/047,584 filed on 23 May 1997, U.S. Appln. No. 60/056,894 filed on 22 Aug. 1997, U.S. Appln. No. 60/047,492 filed on 23 May 1997, U.S. Appln. No. 60/056,911 filed on 22 Aug. 1997, U.S. Appln. No. 60/040,626 filed on 7 Mar. 1997, U.S. Appln. No. 60/047,503 filed on 23 May 1997, U.S. Appln. No. 60/056,903 filed on 22 Aug. 1997, U.S. Appln. No. 60/047,501 filed on 23 May 1997, U.S. Appln. No. 60/056,637 filed on 22 Aug. 1997, U.S. Appln. No. 60/047,590 filed on 23 May 1997, U.S. Appln. No. 60/056,875 filed on 22 Aug. 1997, U.S. Appln. No. 60/047,581 filed on 23 May 1997, U.S. Appln. No. 60/056,882 filed on 22 Aug. 1997, U.S. Appln. No. 60/047,592 filed on 23 May 1997, U.S. Appln. No. 60/056,888 filed on 22 Aug. 1997, U.S. Appln. No. 60/040,334 filed on 7 Mar. 1997, U.S. Appln. No. 60/047,618 filed on 23 May 1997, U.S. Appln. No. 60/056,872 filed on 22 Aug. 1997, U.S. Appln. No. 60/047,617 filed on 23 May 1997, U.S. Appln. No. 60/056,662 filed on 22 Aug. 1997, U.S. Appln. No. 60/047,589 filed on 23 May 1997, U.S. Appln. No. 60/056,862 filed on 22 Aug. 1997, U.S. Appln. No. 60/047,594 filed on 23 May 1997, U.S. Appln. No. 60/056,884 filed on 22 Aug. 1997, U.S. Appln. No. 60/047,583 filed on 23 May 1997, U.S. Appln. No. 60/056,878 filed on 22 Aug. 1997, U.S. Appln. No. 60/040,336 filed on 7 Mar. 1997, U.S. Appln. No. 60/047,502 filed on 23 May 1997, U.S. Appln. No. 60/056,893 filed on 22 Aug. 1997, U.S. Appln. No. 60/047,633 filed on 23 May 1997, U.S. Appln. No. 60/056,630 filed on 22 Aug. 1997, U.S. Appln. No. 60/047,593 filed on 23 May 1997, U.S. Appln. No. 60/056,887 filed on 22 Aug. 1997, U.S. Appln. No. 60/040,163 filed on 7 Mar. 1997, U.S. Appln. No. 60/047,597 filed on 23 May 1997, U.S. Appln. No. 60/056,889 filed on 22 Aug. 1997, U.S. Appln. No. 60/047,615 filed on 23 May 1997, U.S. Appln. No. 60/056,877 filed on 22 Aug. 1997, U.S. Appln. No. 60/047,600 filed on 23 May 1997, U.S. Appln. No. 60/056,886 filed on 22 Aug. 1997, U.S. Appln. No. 60/047,614 filed on 23 May 1997, U.S. Appln. No. 60/056,908 filed on 22 Aug. 1997, U.S. Appln. No. 60/040,710 filed on 14 Mar. 1997, U.S. Appln. No. 60/050,934 filed on 30 May 1997, U.S. Appln. No. 60/048,100 filed on 30 May 1997, U.S. Appln. No. 60/040,762 filed on 14 Mar. 1997, U.S. Appln. No. 60/048,357 filed on 30 May 1997, U.S. Appln. No. 60/048,189 filed on 30 May 1997, U.S. Appln. No. 60/041,277 filed on 21 Mar. 1997, U.S. Appln. No. 60/048,188 filed on 30 May 1997, U.S. Appln. No. 60/048,094 filed on 30 May 1997, U.S. Appln. No. 60/048,350 filed on 30 May 1997, U.S. Appln. No. 60/048,135 filed on 30 May 1997, U.S. Appln. No. 60/042,344 filed on 21 Mar. 1997, U.S. Appln. No. 60/048,187 filed on 30 May 1997, U.S. Appln. No. 60/048,099 filed on 30 May 1997, U.S. Appln. No. 60/050,937 filed on 30 May 1997, U.S. Appln. No. 60/048,352 filed on 30 May 1997, U.S. Appln. No. 60/041,276 filed on 21 Mar. 1997, U.S. Appln. No. 60/048,069 filed on 30 May 1997, U.S. Appln. No. 60/048,131 filed on 30 May 1997, U.S. Appln. No. 60/048,186 filed on 30 May 1997, U.S. Appln. No. 60/048,095 filed on 30 May 1997, U.S. Appln. No. 60/041,281 filed on 21 Mar. 1997, U.S. Appln. No. 60/048,355 filed on 30 May 1997, U.S. Appln. No. 60/048,096 filed on 30 May 1997, U.S. Appln. No. 60/048,351 filed on 30 May 1997, U.S. Appln. No. 60/048,154 filed on 30 May 1997, U.S. Appln. No. 60/048,160 filed on 30 May 1997, U.S. Appln. No. 60/042,825 filed on 8 Apr. 1997, U.S. Appln. No. 60/048,070 filed on 30 May 1997, U.S. Appln. No. 60/042,727 filed on 8 Apr. 1997, U.S. Appln. No. 60/048,068 filed on 30 May 1997, U.S. Appln. No. 60/042,726 filed on 8 Apr. 1997, U.S. Appln. No. 60/048,184 filed on 30 May 1997, U.S. Appln. No. 60/042,728 filed on 8 Apr. 1997, U.S. Appln. No. 60/042,754 filed on 8 Apr. 1997, U.S. Appln. No. 60/048,190 filed on 30 May 1997, U.S. Appln. No. 60/044,039 filed on 30 May 1997, U.S. Appln. No. 60/048,093 filed on 30 May 1997, U.S. Appln. No. 60/048,885 filed on 6 Jun. 1997, U.S. Appln. No. 60/057,645 filed on 5 Sep. 1997, U.S. Appln. No. 60/049,375 filed on 6 Jun. 1997, U.S. Appln. No. 60/057,642 filed on 5 Sep. 1997, U.S. Appln. No. 60/048,881 filed on 6 Jun. 1997, U.S. Appln. No. 60/057,668 filed on 5 Sep. 1997, U.S. Appln. No. 60/048,880 filed on 6 Jun. 1997, U.S. Appln. No. 60/057,635 filed on 5 Sep. 1997, U.S. Appln. No. 60/048,896 filed on 6 Jun. 1997, U.S. Appln. No. 60/057,627 filed on 5 Sep. 1997, U.S. Appln. No. 60/049,020 filed on 6 Jun. 1997, U.S. Appln. No. 60/057,667 filed on 5 Sep. 1997, U.S. Appln. No. 60/048,876 filed on 6 Jun. 1997, U.S. Appln. No. 60/057,666 filed on 5 Sep. 1997, U.S. Appln. No. 60/048,895 filed on 6 Jun. 1997, U.S. Appln. No. 60/057,764 filed on 5 Sep. 1997, U.S. Appln. No. 60/048,884 filed on 6 Jun. 1997, U.S. Appln. No. 60/057,643 filed on 5 Sep. 1997, U.S. Appln. No. 60/048,894 filed on 6 Jun. 1997, U.S. Appln. No. 60/057,769 filed on 5 Sep. 1997, U.S. Appln. No. 60/048,971 filed on 6 Jun. 1997, U.S. Appln. No. 60/057,763 filed on 5 Sep. 1997, U.S. Appln. No. 60/048,964 filed on 6 Jun. 1997, U.S. Appln. No. 60/057,650 filed on 5 Sep. 1997, U.S. Appln. No. 60/048,882 filed on 6 Jun. 1997, U.S. Appln. No. 60/057,584 filed on 5 Sep. 1997, U.S. Appln. No. 60/048,899 filed on 6 Jun. 1997, U.S. Appln. No. 60/057,647 filed on 5 Sep. 1997, U.S. Appln. No. 60/048,893 filed on 6 Jun. 1997, U.S. Appln. No. 60/057,661 filed on 5 Sep. 1997, U.S. Appln. No. 60/048,900 filed on 6 Jun. 1997, U.S. Appln. No. 60/057,662 filed on 5 Sep. 1997, U.S. Appln. No. 60/048,901 filed on 6 Jun. 1997, U.S. Appln. No. 60/057,646 filed on 5 Sep. 1997, U.S. Appln. No. 60/048,892 filed on 6 Jun. 1997, U.S. Appln. No. 60/057,654 filed on 5 Sep. 1997, U.S. Appln. No. 60/048,915 filed on 6 Jun. 1997, U.S. Appln. No. 60/057,651 filed on 5 Sep. 1997, U.S. Appln. No. 60/049,019 filed on 6 Jun. 1997, U.S. Appln. No. 60/057,644 filed on 5 Sep. 1997, U.S. Appln. No. 60/048,970 filed on 6 Jun. 1997, U.S. Appln. No. 60/057,765 filed on 5 Sep. 1997, U.S. Appln. No. 60/048,972 filed on 6 Jun. 1997, U.S. Appln. No. 60/057,762 filed on 5 Sep. 1997, U.S. Appln. No. 60/048,916 filed on 6 Jun. 1997, U.S. Appln. No. 60/057,775 filed on 5 Sep. 1997, U.S. Appln. No. 60/049,373 filed on 6 Jun. 1997, U.S. Appln. No. 60/057,648 filed on 5 Sep. 1997, U.S. Appln. No. 60/048,875 filed on 6 Jun. 1997, U.S. Appln. No. 60/057,774 filed on 5 Sep. 1997, U.S. Appln. No. 60/049,374 filed on 6 Jun. 1997, U.S. Appln. No.: 60/057,649 filed on 5 Sep. 1997, U.S. Appln. No. 60/048,917 filed on 6 Jun. 1997, U.S. Appln. No. 60/057,770 filed on 5 Sep. 1997, U.S. Appln. No. 60/048,949 filed on 6 Jun. 1997, U.S. Appln. No. 60/057,771 filed on 5 Sep. 1997, U.S. Appln. No. 60/048,974 filed on 6 Jun. 1997, U.S. Appln. No. 60/057,761 filed on 5 Sep. 1997, U.S. Appln. No. 60/048,883 filed on 6 Jun. 1997, U.S. Appln. No. 60/057,760 filed on 5 Sep. 1997, U.S. Appln. No. 60/048,897 filed on 6 Jun. 1997, U.S. Appln. No. 60/057,776 filed on 5 Sep. 1997, U.S. Appln. No. 60/048,898 filed on 6 Jun. 1997, U.S. Appln. No. 60/057,778 filed on 5 Sep. 1997, U.S. Appln. No. 60/048,962 filed on 6 Jun. 1997, U.S. Appln. No. 60/057,629 filed on 5 Sep. 1997, U.S. Appln. No. 60/048,963 filed on 6 Jun. 1997, U.S. Appln. No. 60/057,628 filed on 5 Sep. 1997, U.S. Appln. No. 60/048,877 filed on 6 Jun. 1997, U.S. Appln. No. 60/057,777 filed on 5 Sep. 1997, U.S. Appln. No. 60/048,878 filed on 6 Jun. 1997, U.S. Appln. No. 60/057,634 filed on 5 Sep. 1997, U.S. Appln. No. 60/049,608 filed on 13 Jun. 1997, U.S. Appln. No. 60/058,669 filed on 12 Sep. 1997, U.S. Appln. No. 60/049,566 filed on 13 Jun. 1997, U.S. Appln. No. 60/058,668 filed on 12 Sep. 1997, U.S. Appln. No. 60/052,989 filed on 13 Jun. 1997, U.S. Appln. No. 60/058,750 filed on 12 Sep. 1997, U.S. Appln. No. 60/049,607 filed on 13 Jun. 1997, U.S. Appln. No. 60/058,665 filed on 12 Sep. 1997, U.S. Appln. No. 60/049,611 filed on 13 Jun. 1997, U.S. Appln. No. 60/058,971 filed on 12 Sep. 1997, U.S. Appln. No. 60/050,901 filed on 13 Jun. 1997, U.S. Appln. No. 60/058,972 filed on 12 Sep. 1997, U.S. Appln. No. 60/049,609 filed on 13 Jun. 1997, U.S. Appln. No. 60/058,975 filed on 12 Sep. 1997, U.S. Appln. No. 60/048,356 filed on 30 May 1997, U.S. Appln. No. 60/056,296 filed on 29 Aug. 1997, U.S. Appln. No. 60/048,101 filed on 30 May 1997, U.S. Appln. No. 60/056,293 filed on 29 Aug. 1997, U.S. Appln. No. 60/050,935 filed on 30 May 1997, U.S. Appln. No. 60/056,250 filed on 29 Aug. 1997, U.S. Appln. No. 60/049,610 filed on 13 Jun. 1997, U.S. Appln. No. 60/061,060 filed on 2 Oct. 1997, U.S. Appln. No. 60/049,606 filed on 13 Jun. 1997, U.S. Appln. No. 60/060,841 filed on 2 Oct. 1997, U.S. Appln. No. 60/049,550 filed on 13 Jun. 1997, U.S. Appln. No. 60/060,834 filed on 2 Oct. 1997, U.S. Appln. No. 60/049,549 filed on 13 Jun. 1997, U.S. Appln. No. 60/060,865 filed on 2 Oct. 1997, U.S. Appln. No. 60/049,548 filed on 13 Jun. 1997, U.S. Appln. No. 60/060,844 filed on 2 Oct. 1997, U.S. Appln. No. 60/049,547 filed on 13 Jun. 1997, U.S. Appln. No. 60/061,059 filed on 2 Oct. 1997, U.S. Appln. No. 60/051,381 filed on 1 Jul. 1997, U.S. Appln. No. 60/058,598 filed on 12 Sep. 1997, U.S. Appln. No. 60/051,480 filed on 1 Jul. 1997, U.S. Appln. No. 60/058,663 filed on 12 Sep. 1997, U.S. Appln. No. 60/051,926 filed on 8 Jul. 1997, U.S. Appln. No. 60/058,785 filed on 12 Sep. 1997, U.S. Appln. No. 60/052,793 filed on 8 Jul. 1997, U.S. Appln. No. 60/058,664 filed on 12 Sep. 1997, U.S. Appln. No. 60/051,925 filed on 8 Jul. 1997, U.S. Appln. No. 60 /058,66 0 filed on 12 Sep. 1997, U.S. Appln. No. 60/051,929 filed on 8 Jul. 1997, U.S. Appln. No. 60/058,661 filed on 12 Sep. 1997, U.S. Appln. No. 60/052,803 filed on 8 Jul. 1997, U.S. Appln. No. 60/055,722 filed on 18 Aug. 1997, U.S. Appln. No. 60/052,732 filed on 8 Jul. 1997, U.S. Appln. No. 60/055,723 filed on 18 Aug. 1997, U.S. Appln. No. 60/051,932 filed on 8 Jul. 1997, U.S. Appln. No. 60/055,948 filed on 18 Aug. 1997, U.S. Appln. No. 60/051,931 filed on 8 Jul. 1997, U.S. Appln. No. 60/055,949 filed on 18 Aug. 1997, U.S. Appln. No. 60/051,916 filed on 8 Jul. 1997, U.S. Appln. No. 60/055,953 filed on 18 Aug. 1997, U.S. Appln. No. 60/051,930 filed on 8 Jul. 1997, U.S. Appln. No. 60/055,950 filed on 18 Aug. 1997, U.S. Appln. No. 60/051,918 filed on 8 Jul. 1997, U.S. Appln. No. 60/055,947 filed on 18 Aug. 1997, U.S. Appln. No. 60/051,920 filed on 8 Jul. 1997, U.S. Appln. No. 60/055,964 filed on 18 Aug. 1997, U.S. Appln. No. 60/052,733 filed on 8 Jul. 1997, U.S. Appln. No. 60/056,360 filed on 18 Aug. 1997, U.S. Appln. No. 60/052,795 filed on 8 Jul. 1997, U.S. Appln. No. 60/055,684 filed on 18 Aug. 1997, U.S. Appln. No. 60/051,919 filed on 8 Jul. 1997, U.S. Appln. No. 60/055,984 filed on 18 Aug. 1997, U.S. Appln. No. 60/051,928 filed on 8 Jul. 1997, U.S. Appln. No. 60/055,954 filed on 18 Aug. 1997, U.S. Appln. No. 60/052,870 filed on 16 Jul. 1997, U.S. Appln. No. 60/055,952 filed on 18 Aug. 1997, U.S. Appln. No. 60/052,871 filed on 16 Jul. 1997, U.S. Appln. No. 60/055,725 filed on 18 Aug. 1997, U.S. Appln. No. 60/052,872 filed on 16 Jul. 1997, U.S. Appln. No. 60/056,359 filed on 18 Aug. 1997, U.S. Appln. No. 60/052,661 filed on 16 Jul. 1997, U.S. Appln. No. 60/055,985 filed on 18 Aug. 1997, U.S. Appln. No. 60/052,874 filed on 16 Jul. 1997, U.S. Appln. No. 60/055,724 filed on 18 Aug. 1997, U.S. Appln. No. 60/052,873 filed on 16 Jul. 1997, U.S. Appln. No. 60/055,726 filed on 18 Aug. 1997, U.S. Appln. No. 60/052,875 filed on 16 Jul. 1997, U.S. Appln. No. 60/056,361 filed on 18 Aug. 1997, U.S. Appln. No. 60/053,440 filed on 22 Jul. 1997, U.S. Appln. No. 60/055,989 filed on 18 Aug. 1997, U.S. Appln. No. 60/053,441 filed on 22 Jul. 1997, U.S. Appln. No. 60/055,946 filed on 18 Aug. 1997, U.S. Appln. No. 60/053,442 filed on 22 Jul. 1997, U.S. Appln. No. 60/055,683 filed on 18 Aug. 1997, U.S. Appln. No. 60/054,212 filed on 30 Jul. 1997, U.S. Appln. No. 60/055,968 filed on 18 Aug. 1997, U.S. Appln. No. 60/054,209 filed on 30 Jul. 1997, U.S. Appln. No. 60/055,972 filed on 18 Aug. 1997, U.S. Appln. No. 60/054,234 filed on 30 Jul. 1997, U.S. Appln. No. 60/055,969 filed on 18 Aug. 1997, U.S. Appln. No. 60/055,386 filed on 5 Aug. 1997, U.S. Appln. No. 60/055,986 filed on 18 Aug. 1997, U.S. Appln. No. 60/054,807 filed on 5 Aug. 1997, U.S. Appln. No. 60/055,970 filed on 18 Aug. 1997, U.S. Appln. No. 60/054,215 filed on 30 Jul. 1997, U.S. Appln. No. 60/056,543 filed on 19 Aug. 1997, U.S. Appln. No. 60/054,218 filed on 30 Jul. 1997, U.S. Appln. No. 60/056,561 filed on 19 Aug. 1997, U.S. Appln. No. 60/054,214 filed on 30 Jul. 1997, U.S. Appln. No. 60/056,534 filed on 19 Aug. 1997, U.S. Appln. No. 60/054,236 filed on 30 Jul. 1997, U.S. Appln. No. 60/056,729 filed on 19 Aug. 1997, U.S. Appln. No. 60/054,213 filed on 30 Jul. 1997, U.S. Appln. No. 60/056,727 filed on 19 Aug. 1997, U.S. Appln. No. 60/054,211 filed on 30 Jul. 1997, U.S. Appln.=No. 60/056,55 filed on 19 Aug. 1997, U.S. Appln. No. 60/054,217 filed on 30 Jul. 1997, U.S. Appln. No. 60/056,730 filed on 19 Aug. 1997, U.S. Appln. No. 60/055,312 filed on 5 Aug. 1997, U.S. Appln. No. 60/056,563 filed on 19 Aug. 1997, U.S. Appln. No. 60/055,309 filed on 5 Aug. 1997, U.S. Appln. No. 60/056,557 filed on 19 Aug. 1997, U.S. Appln. No. 60/055,310 filed on 5 Aug. 1997, U.S. Appln. No. 60/056,371 filed on 19 Aug. 1997, U.S. Appln. No. 60/054,798 filed on 5 Aug. 1997, U.S. Appln. No. 60/056,732 filed on 19 Aug. 1997, U.S. Appln. No. 60/056,369 filed on 19 Aug. 1997, U.S. Appln. No. 60/056,535 filed on 19 Aug. 1997, U.S. Appln. No. 60/056,556 filed on 19 Aug. 1997, U.S. Appln. No. 60/056,555 filed on 19 Aug. 1997, U.S. Appln. No. 60/054,806 filed on 5 Aug. 1997, U.S. Appln. No. 60/056,366 filed on 19 Aug. 1997, U.S. Appln. No. 60/054,809 filed on 5 Aug. 1997, U.S. Appln. No. 60/056,364 filed on 19 Aug. 1997, U.S. Appln. No. 60/054,804 filed on 5 Aug. 1997, U.S. Appln. No. 60/056,370 filed on 19 Aug. 1997, U.S. Appln. No. 60/054,803 filed on 5 Aug. 1997, U.S. Appln. No. 60/056,731 filed on 19 Aug. 1997, U.S. Appln. No. 60/055,311 filed on 5 Aug. 1997, U.S. Appln. No. 60/056,365 filed on 19 Aug. 1997, U.S. Appln. No. 60/054,808 filed on 5 Aug. 1997, U.S. Appln. No. 60/056,367 filed on 19 Aug. 1997, U.S. Appln. No. 60/056,726 filed on 19 Aug. 1997, U.S. Appln. No. 60/056,368 filed on 19 Aug. 1997, U.S. Appln. No. 60/056,728 filed on 19 Aug. 1997, U.S. Appln. No. 60/056,628 filed on 19 Aug. 1997, U.S. Appln. No. 60/056,629 filed on 19 Aug. 1997, U.S. Appln. No. 60/056,270 filed on 29 Aug. 1997, U.S. Appln. No. 60/056,271 filed on 29 Aug. 1997, U.S. Appln. No. 60/056,247 filed on 29 Aug. 1997, U.S. Appln. No. 60/056,073 filed on 29 Aug. 1997, U.S. Appln. No. 60/057,669 filed on 5 Sep. 1997, U.S. Appln. No. 60/057,663 filed on 5 Sep. 1997, U.S. Appln. No. 60/057,626 filed on 5 Sep. 1997, U.S. Appln. No. 60/058,666 filed on 12 Sep. 1997, U.S. Appln. No. 60/058,973 filed on 12 Sep. 1997, U.S. Appln. No. 60/058,974 filed on 12 Sep. 1997, U.S. Appln. No. 60/058,667 filed on 12 Sep. 1997, U.S. Appln. No. 60/060,837 filed on 2 Oct. 1997, U.S. Appln. No. 60/060,862 filed on 2 Oct. 1997, U.S. Appln. No. 60/060,839 filed on 2 Oct. 1997, U.S. Appln. No. 60/060,866 filed on 2 Oct. 1997, U.S. Appln. No. 60/060,843 filed on 2 Oct. 1997, U.S. Appln. No. 60/060,836 filed on 2 Oct. 1997, U.S. Appln. No. 60/060,838 filed on 2 Oct. 1997, U.S. Appln. No. 60/060,874 filed on 2 Oct. 1997, U.S. Appln. No. 60/060,833 filed on 2 Oct. 1997, U.S. Appln. No. 60/060,884 filed on 2 Oct. 1997, U.S. Appln. No. 60/060,880 filed on 2 Oct. 1997, U.S. Appln. No. 60/061,463 filed on Oct. 9, 1997, U.S. Appln. No. 60/061,529 filed on 9 Oct. 1997, U.S. Appln. No. 60/071,498 filed on 9 Oct. 1997, U.S. Appln. No. 60/061,527 filed on 9 Oct. 1997, U.S. Appln. No. 60/061,536 filed on 9 Oct. 1997, U.S. Appln. No. 60/061,532 filed on 9 Oct. 1997, U.S. Appln. No. 60/063,099 filed on 24 Oct. 1997, U.S. Appln. No. 60/063,088 filed on 24 Oct. 1997, U.S. Appln. No. 60/063,100 filed on 24 Oct. 1997, U.S. Appln. No. 60/063,387 filed on 24 Oct. 1997, U.S. Appln. No. 60/063,148 filed on 24 Oct. 1997, U.S. Appln. No. 60/063,386 filed on 24 Oct. 1997, U.S. Appln. No. 60/062,784 filed on 24 Oct. 1997, U.S. Appln. No. 60/063,091 filed on 24 Oct. 1997, U.S. Appln. No. 60/063,090 filed on 24 Oct. 1997, U.S. Appln. No. 60/063,089 filed on 24 Oct. 1997, U.S. Appln. No. 60/063,092 filed on 24 Oct. 1997, U.S. Appln. No. 60/063,111 filed on 24 Oct. 1997, U.S. Appln. No. 60/063,101 filed on 24 Oct. 1997, U.S. Appln. No. 60/063,109 filed on 24 Oct. 1997, U.S. Appln. No. 60/063,110 filed on 24 Oct. 1997, U.S. Appln. No. 60/063,098 filed on 24 Oct. 1997, U.S. Appln. No. 60/063,097 filed on 24 Oct. 1997, U.S. Appln. No. 60/064,911 filed on 7 Nov. 1997, U.S. Appln. No. 60/064,912 filed on 7 Nov. 1997, U.S. Appln. No. 60/064,983 filed on 7 Nov. 1997, U.S. Appln. No. 60/064,900 filed on 7 Nov. 1997, U.S. Appln. No. 60/064,988 filed on 7 Nov. 1997, U.S. Appln. No. 60/064,987 filed on 7 Nov. 1997, U.S. Appln. No. 60/064,908 filed on 7 Nov. 1997, U.S. Appln. No. 60/064,984 filed on 7 Nov. 1997, U.S. Appln. No. 60/064,985 filed on 7 Nov. 1997, U.S. Appln. No. 60/066,094 filed on 17 Nov. 1997, U.S. Appln. No. 60/066,100 filed on 17 Nov. 1997, U.S. Appln. No. 60/066,089 filed on 17 Nov. 1997, U.S. Appln. No. 60/066,095 filed on 17 Nov. 1997, U.S. Appln. No. 60/066,090 filed on 17 Nov. 1997, U.S. Appln. No. 60/068,006 filed on 18 Dec. 1997, U.S. Appln. No. 60/068,057 filed on 18 Dec. 1997, U.S. Appln. No. 60/068,007 filed on 18 Dec. 1997, U.S. Appln. No. 60/068,008 filed on 18 Dec. 1997, U.S. Appln. No. 60/068,054 filed on 18 Dec. 1997, U.S. Appln. No. 60/068,064 filed on 18 Dec. 1997, U.S. Appln. No. 60/068,053 filed on 18 Dec. 1997, U.S. Appln. No. 60/070,923 filed on 18 Dec. 1997, U.S. Appln. No. 60/068,365 filed on 19 Dec. 1997, U.S. Appln. No. 60/068,169 filed on 19 Dec. 1997, U.S. Appln. No. 60/068,367 filed on 19 Dec. 1997, U.S. Appln. No. 60/068,369 filed on 19 Dec. 1997, U.S. Appln. No. 60/068,368 filed on 19 Dec. 1997, U.S. Appln. No. 60/070,657 filed on 7 Jan. 1998, U.S. Appln. No. 60/070,692 filed on 7 Jan. 1998, U.S. Appln. No. 60/070,704 filed on 7 Jan. 1998, U.S. Appln. No. 60/070,658 filed on 7 Jan. 1998, U.S. Appln. No. 60/073,160 filed on 30 Jan. 1998, U.S. Appln. No. 60/073,159 filed on 30 Jan. 1998, U.S. Appln. No. 60/073,165 filed on 30 Jan. 1998, U.S. Appln. No. 60/073,164 filed on 30 Jan. 1998, U.S. Appln. No. 60/073,167 filed on 30 Jan. 1998, U.S. Appln. No. 60/073,162 filed on 30 Jan. 1998, U.S. Appln. No. 60/073,161 filed on 30 Jan. 1998, U.S. Appln. No. 60/073,170 filed on 30 Jan. 1998, U.S. Appln. No. 60/074,141 filed on 9 Feb. 1998, U.S. Appln. No. 60/074,341 filed on 9 Feb. 1998, U.S. Appln. No. 60/074,037 filed on 9 Feb. 1998, U.S. Appln. No. 60/074,157 filed on 9 Feb. 1998, U.S. Appln. No. 60/074,118 filed on 9 Feb. 1998, U.S. Appln. No. 60/076,051 filed on 26 Feb. 1998, U.S. Appln. No. 60/076,053 filed on 26 Feb. 1998, U.S. Appln. No. 60/076,054 filed on 26 Feb. 1998, U.S. Appln. No. 60/076,052 filed on 26 Feb. 1998, U.S. Appln. No. 60/076,057 filed on 26 Feb. 1998, U.S. Appln. No. 60/077,714 filed on 12 Mar. 1998, U.S. Appln. No. 60/077,687 filed on 12 Mar. 1998, U.S. Appln. No. 60/077,686 filed on 12 Mar. 1998, U.S. Appln. No. 60/077,696 filed on 12 Mar. 1998, U.S. Appln. No. 60/078,566 filed on 19 Mar. 1998, U.S. Appln. No. 60/078,574 filed on 19 Mar. 1998, U.S. Appln. No. 60/078,576 filed on 19 Mar. 1998, U.S. Appln. No. 60/078,579 filed on 19 Mar. 1998, U.S. Appln. No. 60/078,563 filed on 19 Mar. 1998, U.S. Appln. No. 60/078,573 filed on 19 Mar. 1998, U.S. Appln. No. 60/078,578 filed on 19 Mar. 1998, U.S. Appln. No. 60/078,581 filed on 19 Mar. 1998, U.S. Appln. No. 60/078,577 filed on 19 Mar. 1998, U.S. Appln. No. 60/080,314 filed on 1 Apr. 1998, U.S. Appln. No. 60/080,312 filed on 1 Apr. 1998, U.S. Appln. No. 60/080,313 filed on 1 Apr. 1998, U.S. Appln. No. 60/085,180 filed on 12 May 1998, U.S. Appln. No. 60/085,105 filed on 12 May 1998, U.S. Appln. No. 60/085,094 filed on 12 May 1998, U.S. Appln. No. 60/085,093 filed on 12 May 1998, U.S. Appln. No. 60/085,924 filed on 18 May 1998, U.S. Appln. No. 60/085,906 filed on 18 May 1998, U.S. Appln. No. 60/085,927 filed on 18 May 1998, U.S. Appln. No. 60/085,920 filed on 18 May 1998, U.S. Appln. No. 60/085,928 filed on 18 May 1998, U.S. Appln. No. 60/085,925 filed on 18 May 1998, U.S. Appln. No. 60/085,921 filed on 18 May 1998, U.S. Appln. No. 60/085,923 filed on 18 May 1998, U.S. Appln. No. 60/085,922 filed on 18 May 1998, U.S. Appln. No. 60/090,112 filed on 22 Jun. 1998, U.S. Appln. No. 60/089,508 filed on 16 Jun. 1998, U.S. Appln. No. 60/089,507 filed on 16 Jun. 1998, U.S. Appln. No. 60/089,510 filed on 16 Jun. 1998, U.S. Appln. No. 60/089,509 filed on 16 Jun. 1998, U.S. Appln. No. 60/090,113 filed on 22 Jun. 1998, U.S. Appln. No. 60/092,956 filed on 15 Jul. 1998, U.S. Appln. No. 60/092,921 filed on 15 Jul. 1998, U.S. Appln. No. 60/092,922 filed on 15 Jul. 1998, U.S. Appln. No. 60/094,657 filed on 30 Jul. 1998, U.S. Appln. No. 60/095,486 filed on 5 Aug. 1998, U.S. Appln. No. 60/096,319 filed on 12 Aug. 1998, U.S. Appln. No. 60/095,455 filed on 6 Aug. 1998, U.S. Appln. No. 60/095,454 filed on 6 Aug. 1998, U.S. Appln. No. 60/097,917 filed on 25 Aug. 1998, U.S. Appln. No. 60/098,634 filed on 31 Aug. 1998, U.S. Appln. No. 60/101,546 filed on 23 Sep. 1998, U.S. Appln. No. 60/102,895 filed on 2 Oct. 1998, U.S. Appln. No. 60/108,207 filed on 12 Nov. 1998, U.S. Appln. No. 60/113,006 filed on 18 Dec. 1998, U.S. Appln. No. 60/112,809 filed on 17 Dec. 1998, U.S. Appln. No. 60/116,330 filed on 19 Jan. 1999, U.S. Appln. No. 60/119,468 filed on 10 Feb. 1999, U.S. Appln. No. 60/125,055 filed on 18 Mar. 1999, U.S. Appln. No. 60/128,693 filed on 9 Apr. 1999, U.S. Appln. No. 60/130,991 filed on 26 Apr. 1999, U.S. Appln. No. 60/137,725 filed on 7 Jun. 1999, U.S. Appln. No. 60/145,220 filed on 23 Jul. 1999, U.S. Appln. No. 60/149,182 filed on 17 Aug. 1999, U.S. Appln. No. 60/152,317 filed on 3 Sep. 1999, U.S. Appln. No. 60/152,315 filed on 3 Sep. 1999, U.S. Appln. No. 60/155,709 filed on 24 Sep. 1999, U.S. Appln. No. 60/163,085 filed on 2 Nov. 1999, U.S. Appln. No. 60/172,411 filed on 17 Dec. 1999, U.S. Appln. No. 60/162,239 filed on 29 Oct. 1999, U.S. Appln. No. 60/215,139 filed on 30 Jun. 2000, U.S. Appln. No. 60/162,211 filed on 29 Oct. 1999, U.S. Appln. No. 60/215,138 filed on 30 Jun. 2000, U.S. Appln. No. 60/162,240 filed on 29 Oct. 1999, U.S. Appln. No. 60/215,131 filed on 30 Jun. 2000, U.S. Appln. No. 60/162,237 filed on 29 Oct. 1999, U.S. Appln. No. 60/219,666 filed on 21 Jul. 2000, U.S. Appln. No. 60/162,238 filed on 29 Oct. 1999, U.S. Appln. No. 60/215,134 filed on 30 Jun. 2000, U.S. Appln. No. 60/163,580 filed on 5 Nov. 1999, U.S. Appln. No. 60/215,130 filed on 30 Jun. 2000, U.S. Appln. No. 60/163,577 filed on 5 Nov. 1999, U.S. Appln. No. 60/215,137 filed on 30 Jun. 2000, U.S. Appln. No. 60/163,581 filed on 5 Nov. 1999, U.S. Appln. No. 60/215,133 filed on 30 Jun. 2000, U.S. Appln. No. 60/163,576 filed on 5 Nov. 1999, U.S. Appln. No. 60/221,366 filed on 27 Jul. 2000, U.S. Appln. No. 60/164,344 filed on 9 Nov. 1999, U.S. Appln. No. 60/195,296 filed on 7 Apr. 2000, U.S. Appln. No. 60/221,367 filed on 27 Jul. 2000, U.S. Appln. No. 60/164,835 filed on 12 Nov. 1999, U.S. Appln. No. 60/221,142 filed on 27 Jul. 2000, U.S. Appln. No. 60/164,744 filed on 12 Nov. 1999, U.S. Appln. No. 60/215,140 filed on 30 Jun. 2000, U.S. Appln. No. 60/164,735 filed on 12 Nov. 1999, U.S. Appln. No. 60/221,193 filed on 27 Jul. 2000, U.S. Appln. No. 60/164,825 filed on 12 Nov. 1999, U.S. Appln. No. 60/222,904 filed on 3 Aug. 2000, U.S. Appln. No. 60/164,834 filed on 12 Nov. 1999, U.S. Appln. No. 60/224,007 filed on 4 Aug. 2000, U.S. Appln. No. 60/164,750 filed on 12 Nov. 1999, U.S. Appln. No. 60/215,128 filed on 30 Jun. 2000, U.S. Appln. No. 60/166,415 filed on 19 Nov. 1999, U.S. Appln. No. 60/215,136 filed on 30 Jun. 2000, U.S. Appln. No. 60/166,414 filed on 19 Nov. 1999, U.S. Appln. No. 60/219,665 filed on 21 Jul. 2000, U.S. Appln. No. 60/164,731 filed on 12 Nov. 1999, U.S. Appln. No. 60/215,132 filed on 30 Jun. 2000, U.S. Appln. No. 60/226,280 filed on 18 Aug. 2000, U.S. Appln. No. 60/256,968 filed on 21 Dec. 2000, U.S. Appln. No. 60/226,380 filed on 18 Aug. 2000, U.S. Appln. No. 60/259,803 filed on 5 Jan. 2001, U.S. Appln. No. 60/228,084 filed on 28 Aug. 2000, U.S. Appln. No. 09/915,582 filed on 27 Jul. 2001, U.S. Appln. No. 60/231,968 filed on 12 Sep. 2000, U.S. Appln. No. 60/236,326 filed on 29 Sep. 2000, U.S. Appln. No. 60/234,211 filed on 20 Sep. 2000, U.S. Appln. No. 60/226,282 filed on 18 Aug. 2000, U.S. Appln. No. 60/232,104 filed on 12 Sep. 2000, U.S. Appln. No. 60/234,210 filed on 20 Sep. 2000, U.S. Appln. No. 60/226,278 filed on 18 Aug. 2000, U.S. Appln. No. 60/259,805 filed on 5 Jan. 2001, U.S. Appln. No. 60/226,279 filed on 18 Aug. 2000, U.S. Appln. No. 60/259,678 filed on 5 Jan. 2001, U.S. Appln. No. 60/226,281 filed on 18 Aug. 2000, U.S. Appln. No. 60/231,969 filed on 12 Sep. 2000, U.S. Appln. No. 60/228,086 filed on 28 Aug. 2000, U.S. Appln. No. 60/259,516 filed on 4 Jan. 2001, U.S. Appln. No. 60/228,083 filed on 28 Aug. 2000, U.S. Appln. No. 60/259,804 filed on 5 Jan. 2001, U.S. Appln. No. 60/270,658 filed on 23 Feb. 2001, U.S. Appln. No. 60/304,444 filed on 12 Jul. 2001, U.S. Appln. No. 60/270,625 filed on 23 Feb. 2001, U.S. Appln. No. 60/304,417 filed on 12 Jul. 2001, U.S. Appln. No. 60/295,869 filed on 6 Jun. 2001, U.S. Appln. No. 60/304,121 filed on 11 Jul. 2001, U.S. Appln. No. 60/311,085 filed on 10 Aug. 2001, U.S. Appln. No. 60/325,209 filed on 28 Sep. 2001, U.S. Appln. No. 60/330,629 filed on 26 Oct. 2001, U.S. Appln. No. 60/331,046 filed on 7 Nov. 2001, U.S. Appln. No. 60/358,554 filed on 22 Feb. 2002, U.S. Appln. No. 60/358,714 filed on 25 Feb. 2002, U.S. Appln. No. 60/277,340 filed on 21 Mar. 2001, U.S. Appln. No. 60/306,171 filed on 19 Jul. 2001, U.S. Appln. No. 60/278,650 filed on 27 Mar. 2001, U.S. Appln. No. 60/331,287 filed on 13 Nov. 2001, U.S. application Ser. No. 09/950,082 filed on 12 Sep. 2001, U.S. application Ser. No. 09/950,083 filed on 12 Sep. 2001, PCT Appln. No. US00/29363 filed on 25 Oct. 2000, PCT Appln. No. US00/29360 filed on 25 Oct. 2000, PCT Appln. No. US00/29362 filed on 25 Oct. 2000, PCT Appln. No. US00/29365 filed on 25 Oct. 2000, PCT Appln. No. US00/29364 filed on 25 Oct. 2000, PCT Appln. No. US00/30040 filed on 1 Nov. 2000, PCT Appln. No. US00/30037 filed on 1 Nov. 2000, PCT Appln. No. US00/30045 filed on 1 Nov. 2000, PCT Appln. No. US00/30036 filed on 1 Nov. 2000, PCT Appln. No. US00/30039 filed on 1 Nov. 2000, PCT Appln. No. US00/30654 filed on 8 Nov. 2000, PCT Appln. No. US00/30628 filed on 8 Nov. 2000, PCT Appln. No. US00/30653 filed on 8 Nov. 2000, PCT Appln. No. US00/30629 filed on 8 Nov. 2000, PCT Appln. No. US00/30679 filed on 8 Nov. 2000, PCT Appln. No. US00/30674 filed on 8 Nov. 2000, PCT Appln. No. US00/31162 filed on 15 Nov. 2000, PCT Appln. No. US00/31282 filed on 15 Nov. 2000, PCT Appln. No. US00/30657 filed on 8 Nov. 2000, PCT Appln. No. US01/01396 filed on 17 Jan. 2001, PCT Appln. No. US01/01387 filed on 17 Jan. 2001, PCT Appln. No. US01/01567 filed on 17 Jan. 2001, PCT Appln. No. US01/01431 filed on 17 Jan. 2001, PCT Appln. No. US01/01432 filed on 17 Jan. 2001, PCT Appln. No. US01/00544 filed on 9 Jan. 2001, PCT Appln. No. US01/01435 filed on 17 Jan. 2001, PCT Appln. No. US01/01386 filed on 17 Jan. 2001, PCT Appln. No. US01/01565 filed on 17 Jan. 2001, PCT Appln. No. US01/01394 filed on 17 Jan. 2001, PCT Appln. No. US01/01434 filed on 17 Jan. 2001, PCT Appln. No. US01/01397 filed on 17 Jan. 2001, PCT Appln. No. US01/01385 filed on 17 Jan. 2001, PCT Appln. No. US01/01384 filed on. 17 Jan. 2001, PCT Appln. No. US01/01383 filed on 17 Jan. 2001, PCT Appln. No. (Atty. Dkt. No. PS735; unassigned) filed on 21 Feb. 2002, PCT Appln. No. (Atty. Dkt. No. PS736; unassigned) filed on 21 Feb. 2002, U.S. application Ser. No. 09/148,545 filed on 4 Sep. 1998, U.S. application Ser. No. 09/621,011 filed on 20 Jul. 2000, U.S. application Ser. No. 09/981,876 filed on 19 Oct. 2001, U.S. application Ser. No. 09/149,476 filed on 8 Sep. 1998, U.S. application Ser. No. 09/809,391 filed on 16 Mar. 2001, U.S. application Ser. No. 09/882,171 filed on 18, Jun. 2001, U.S. Appln. No. 60/190,068 filed on 17 Mar. 2000, U.S. application Ser. No. 09/152,060 filed on 11 Sep. 1998, U.S. application Ser. No. 09/852,797 filed on 11 May 2001, U.S. application Ser. No. 09/853,161 filed on 11 May 2001, U.S. application Ser. No. 09/852,659 filed on 11 May 2001, U.S. application Ser. No. 10/058,993 filed on 30 Jan. 2002, U.S. Appln. No. 60/265,583 filed on 2 Feb. 2001, U.S. application Ser. No. 09/154,707 filed on 17 Sep. 1998, U.S. application Ser. No. 09/966,262 filed on 1 Oct. 2001, U.S. application Ser. No. 09/983,966 filed on 26 Oct. 2001, U.S. application Ser. No. 10/059,395 filed on 31 Jan. 2002, U.S. application Ser. No. 09/984,245 filed on 29 Oct. 2001, U.S. application Ser. No. 09/166,780 filed on 6 Oct. 1998, U.S. application Ser. No. 09/577,145 filed on 24 May 2000, U.S. application Ser. No. 09/814,122 filed on 22 Mar. 2001, U.S. application Ser. No. 09/189,144 filed on 10 Nov. 1998, U.S. application Ser. No. 09/690,454 filed on 18 Oct. 2000, U.S. application Ser. No. (Atty. Dkt. No. PZ006G13A; unassigned) filed on 5 Feb. 2002, U.S. application Ser. No. 10/062,599 filed on 5 Feb. 2002, U.S. application Ser. No. 09/205,258 filed on 4 Dec. 1998, U.S. application Ser. No. 09/933,767 filed on 22 Aug. 2001, U.S. Appln. No. 60/184,836 filed on 24 Feb. 2000, U.S. Appln. No. 60/193,170 filed on 29Mar. 2000, U.S. application Ser. No. 10/023,282 filed on 20 Dec. 2001, U.S. application Ser. No. 10/004,860 filed on 7 Dec. 2001, U.S. application Ser. No. 09/209,462 filed on 11 Dec. 1998, U.S. application Ser. No. 09/213,365 filed on 17 Dec. 1998, U.S. application Ser. No. 09/627,081 filed on 27 Jul. 2000, U.S. application Ser. No. 09/227,357 filed on 8 Jan. 1999, U.S. application Ser. No. 09/983,802 filed on 25 Oct. 2001, U.S. application Ser. No. 09/973,278 filed on 10 Oct. 2001, U.S. Appln. No. 60/239,899 filed on 13 Oct. 2000, U.S. application Ser. No. 09/984,490 filed on 30 Oct. 2001, U.S. application Ser. No. 09/776,724 filed on 6 Feb. 2001, U.S. application Ser. No. 09/229,982 filed on 14 Jan. 1999, U.S. application Ser. No. 09/669,688 filed on 26 Sep. 2000, U.S. Appln. No. 60/180,909 filed on 8 Feb. 2000, U.S. application Ser. No. 09/236,557 filed on 26 Jan. 1999, U.S. application Ser. No. 09/666,984 filed on 21 Sep. 2000, U.S. application Ser. No. 09/820,649 filed on 30 Mar. 2001, U.S. Appln. No. 60/295,558 filed on 5 Jun. 2001, U.S. application Ser. No. 09/244,112 filed on 4 Feb. 1999, U.S. application Ser. No. 09/774,639 filed on 1 Feb. 2001, U.S. application Ser. No. 09/969,730 filed on 4 Oct. 2001, U.S. Appln. No. 60/238,291 filed on 6 Oct. 2000, U.S. application Ser. No. 09/251,329 filed on 17 Feb. 1999, U.S. application Ser. No. 09/716,128 filed on 17 Nov. 2000, U.S. application Ser. No. 09/257,179 filed on 25 Feb. 1999, U.S. application Ser. No. 09/729,835 filed on 6 Dec. 2000, U.S. application Ser. No. 09/262,109 filed on 4 Mar. 1999, U.S. application Ser. No. 09/722,329 filed on 28 Nov. 2000, U.S. application Ser. No. (Atty. Dkt. No. PZ016P1C1; unassigned) filed on 17 Jan. 2002, U.S. Appln. No. 60/262,066 filed on 18 Jan. 2001, U.S. application Ser. No. 09/281,976 filed on 31 Mar. 1999, U.S. application Ser. No. 09/288,143 filed on 8 Apr. 1999, U.S. application Ser. No. 09/984,429 filed on 30 Oct. 2001, U.S. Appln. No. 60/244,591 filed on 01 Nov. 2000, U.S. application Ser. No. 09/296,622 filed on 23 Apr. 1999, U.S. application Ser. No. 09/305,736 filed on 5 May 1999, U.S. application Ser. No. 09/818,683 filed on 28 Mar. 2001, U.S. application Ser. No. 09/974,879 filed on 12 Oct. 2001, U.S. Appln. No. 60/239,893 filed on 13 Oct. 2000, U.S. application Ser. No. 09/334,595 filed on 17 Jun. 1999, U.S. application Ser. No. 09/348,457 filed on 7 Jul. 1999, U.S. application Ser. No. 09/739,907 filed on 20 Dec. 2000, U.S. application Ser. No. 09/938,671 filed on 27 Aug. 2001, U.S. application Ser. No. 09/363,044 filed on 29 Jul. 1999, U.S. application Ser. No. 09/813,153 filed on 21 Mar. 2001, U.S. application Ser. No. 09/949,925 filed on 12 Sep. 2001, U.S. Appln. No. 60/232,150 filed on 12 Sep. 2000, U.S. application Ser. No. 09/369,247 filed on 5 Aug. 1999, U.S. application Ser. No. 10/062,548 filed on 5 Feb. 2002, U.S. application Ser. No. 09/382,572 filed on 25 Aug. 1999, U.S. application Ser. No.09/716,129 filed on 17 Nov. 2000, U.S. application Ser. No. 09/393,022 filed on 9 Sep. 1999, U.S. application Ser. No. 09/798,889 filed on 6 Mar. 2001, U.S. application Ser. No. 09/397,945 filed on 17 Sep. 1999, U.S. application Ser. No. 09/437,658 filed on 10 Nov. 1999, U.S. application Ser. No. 09/892,877 filed on 28 Jun. 2001, U.S. application Ser. No. 09/948,783 filed on 10 Sep. 2001, U.S. Appln. No. 60/231,846 filed on 11 Sep. 2000, U.S. application Ser. No. 09/461,325 filed on 14 Dec. 1999, U.S. application Ser. No. 10/050,873 filed on 18 Jan. 2002, U.S. Appln. No. 60/263,230 filed on 23 Jan. 2001, U.S. Appln. No. 60/263,681 filed on 24 Jan. 2001, U.S. application Ser. No. 10/012,542 filed on 12 Dec. 2001, U.S. application Ser. No. 09/482,273 filed on 13 Jan. 2000, U.S. Appln. No. 60/234,925 filed on 25 Sep. 2000, U.S. application Ser. No. 09/984,276 filed on 29 Oct. 2001, U.S. application Ser. No. 09/984,271 filed on 29 Oct. 2001, U.S. application Ser. No. 09/489,847 filed on 24 Jan. 2000, U.S. Appln. No. 60/350,898 filed on 25 Jan. 2002, U.S. application Ser. No. 09/511,554 filed on 23 Feb. 2000, U.S. application Ser. No. 09/739,254 filed on 19 Dec. 2000, U.S. application Ser. No. 09/904,615 filed on 16 Jul. 2001, U.S. application Ser. No. 10/054,988 filed on 25 Jan. 2002, U.S. application Ser. No. 09/531,119 filed on 20 Mar. 2000, U.S. application Ser. No. 09/820,893 filed on 30 Mar. 2001, U.S. application Ser. No. 09/565,391 filed on 5 May 2000, U.S. application Ser. No. 09/948,820 filed on 10 Sep. 2001, U.S. application Ser. No. 09/591,316 filed on 9 Jun. 2000, U.S. application Ser. No. 09/895,298 filed on 2 Jul. 2001, U.S. application Ser. No. 09/618,150 filed on 17 Jul. 2000, U.S. application Ser. No. 09/985,153 filed on 1 Nov. 2001, U.S. application Ser. No. 09/628,508 filed on 28 Jul. 2000, U.S. application Ser. No. 09/997,131 filed on 30 Nov. 2001, U.S. application Ser. No. 09/661,453 filed on 13 Sep. 2000, U.S. application Ser. No. 10/050,882 filed on 18 Jan. 2002, U.S. application Ser. No. 09/684,524 filed on 10 Oct. 2000, U.S. application Ser. No. 10/050,704 filed on 18 Jan. 2002, U.S. application Ser. No. 09/726,643 filed on 1 Dec. 2000, U.S. application Ser. No. 10/042,141 filed on 11 Jan. 2002, U.S. application Ser. No. 09/756,168 filed on 9 Jan. 2001, U.S. application Ser. No. 09/781,417 filed on 13 Feb. 2001, U.S. application Ser. No. (Atty. Dkt. No. PZ042P1C1; unassigned) filed on 1 Feb. 2002, U.S. application Ser. No. 09/789,561 filed on 22 Feb. 2001, U.S. application Ser. No. 09/800,729 filed on 8 Mar. 2001, U.S. application Ser. No. 09/832,129 filed on 11 Apr, 2001, PCT Appln. No. US98/04482 filed on 6 Mar. 1998, PCT Appln. No. US98/04493 filed on 6 Mar. 1998, PCT Appln. No. US98/04858 filed on 12 Mar. 1998, PCT Appln. No. US98/05311 filed on 19 Mar. 1998, PCT Appln. No. US98/06801 filed on 7 Apr. 1998, PCT Appln. No. US98/10868 filed on 28 May 1998, PCT Appln. No. US98/11422 filed on 4 Jun. 1998, PCT Appln. No. US01/05614 filed on 21 Feb. 2001, PCT Appln. No. US98/12125 filed on 11 Jun. 1998, PCT Appln. No. US98/13608 filed on 30 Jun. 1998, PCT Appln. No. US98/13684 filed on 7 Jul. 1998, PCT Appln. No. US98/14613 filed on 15 Jul. 1998, PCT Appln. No. US98/15949 filed on 29 Jul. 1998, PCT Appln. No. US98/16235 filed on 4 Aug. 1998, PCT Appln. No. US98/17044 filed on 18 Aug. 1998, PCT Appln. No. US98/17709 filed on 27 Aug. 1998, PCT Appln. No. US98/18360 filed on 3 Sep. 1998, PCT Appln. No. (Atty. Dkt. No. PZ016PCT2; unassigned) filed on 17 Jan. 2002, PCT Appln. No.US98/20775 filed on 1 Oct. 1998, PCT Appln. No. US98/21142 filed on 8 Oct. 1998, PCT Appln. No.US98/22376 filed on 23 Oct. 1998, PCT Appln. No. US98/23435 filed on 4 Nov. 1998, PCT Appln. No. US98/27059 filed on 17 Dec. 1998, PCT Appln. No.US99/00108 filed on 6 Jan. 1999, PCT Appln. No.US99/01621 filed on 27 Jan. 1999, PCT Appln. No.US99/02293 filed on 4 Feb. 1999, PCT Appln. No.US99/03939 filed on 24 Feb. 1999, PCT Appln. No.US99/05721 filed on 11 Mar. 1999, PCT Appln. No.US99/05804 filed on 18 Mar. 1999, PCT Appln. No.US99/09847 filed on 6 May 1999, PCT Appln. No.US99/13418 filed on 15 Jun. 1999, PCT Appln. No.US99/15849 filed on 14 Jul. 1999, PCT Appln. No.US01/00911 filed on 12 Jan. 2001, PCT Appln. No.US01/29871 filed on 24 Sep. 2001, PCT Appln. No.US99/17130 filed on 29 Jul. 1999, PCT Appln. No.US99/19330 filed on 24 Jul. 1999, PCT Appln. No.US99/22012 filed on 22 Sep. 1999, PCT Appln. No.US99/26409 filed on 9 Nov. 1999, PCT Appln. No.US99/29950 filed on 16 Dec. 1999, PCT Appln. No.US00/00903 filed on 18 Jan. 2000, PCT Appln. No.US00/03062 filed on 8 Feb. 2000, PCT Appln. No.US00/06783 filed on 16 Mar. 2000, PCT Appln. No.US00/08979 filed on 6 Apr. 2000, PCT Appln. No.US00/15187 filed on 2 Jun. 2000, PCT Appln. No.US00/19735 filed on 20 Jul. 2000, PCT! Appln. No. US00/22325 filed on 16 Aug. 2000, PCT Appln. No.US00/24008 filed on 31 Aug. 2000, PCT Appln. No.US00/26013 filed on 22 Sep. 2000, PCT Appln. No.US00/28664 filed on 17 Oct. 2000, U.S. application Ser. No. 09/833,245 filed on 12 Apr. 2001, and PCT Appln. No. US01/11988 filed on 12 Apr. 2001.

[image]

[image]

Europe

[1020] In respect of those designations in which a European Patent is sought a sample of the deposited microorganism will be made available until the publication of the mention of the grant of the European patent or until the date on which the application has been refused or withdrawn or is deemed to be withdrawn, only by the issue of such a sample to an expert nominated by the person requesting the sample (Rule 28(4) EPC).

Canada

[1021] The applicant requests that, until either a Canadian patent has been issued on the basis of an application or the application has been refused, or is abandoned and no longer subject to reinstatement, or is withdrawn, the Commissioner of Patents only authorizes the furnishing of a sample of the deposited biological material referred to in the application to an independent expert nominated by the Commissioner, the applicant must, by a written statement, inform the International Bureau accordingly before completion of technical preparations for publication of the international application.

Norway

[1022] The applicant hereby requests that the application has been laid open to public inspection (by the Norwegian Patent Office), or has been finally decided upon by the Norwegian Patent Office without having been laid open inspection, the furnishing of a sample shall only be effected to an expert in the art. The request to this effect shall be filed by the applicant with the Norwegian Patent Office not later than at the time when the application is made available to the public under Sections 22 and 33(3) of the Norwegian Patents Act. If such a request has been filed by the applicant, any request made by a third party for the fiunishing of a sample shall indicate the expert to be used. That expert may be any person entered on the list of recognized experts drawn up by the Norwegian Patent Office or any person approved by the applicant in the individual case.

Australia

[1023] The applicant hereby gives notice that the furnishing of a sample of a microorganism shall only be effected prior to the grant of a patent, or prior to the lapsing, refusal or withdrawal of the application, to a person who is a skilled addressee without an interest in the invention (Regulation 3.25(3) of the Australian Patents Regulations).

Finland

[1024] The applicant hereby requests that, until the application has been laid open to public inspection (by the National Board of Patents and Regulations), or has been finally decided upon by the National Board of Patents and Registration without having been laid open to public inspection, the furnishing of a sample shall only be effected to an expert in the art.

United Kingdom

[1025] The applicant hereby requests that the furnishing of a sample of a microorganism shall only be made available to an expert. The request to this effect must be filed by the applicant with the International Bureau before the completion of the technical preparations for the international publication of the application.

Denmark

[1026] The applicant hereby requests that, until the application has been laid open to public inspection (by the Danish Patent Office), or has been finally decided upon by the Danish Patent office without having been laid open to public inspection, the furnishing of a sample shall only be effected to an expert in the art. The request to this effect shall be filed by the applicant with the Danish Patent Office not later that at the time when the application is made available to the public under Sections 22 and 33(3) of the Danish Patents Act. If such a request has been filed by the applicant, any request made by a third party for the furnishing of a sample shall indicate the expert to be used. That expert may be any person entered on a list of recognized experts drawn up by the Danish Patent Office or any person by the applicant in the individual case.

Sweden

[1027] The applicant hereby requests that, until the application has been laid open to public inspection (by the Swedish Patent Office), or has been finally decided upon by the Swedish Patent Office without having been laid open to public inspection, the furnishing of a sample shall only be effected to an expert in the art. The request to this effect shall be filed by the applicant with the International Bureau before the expiration of 16 months from the priority date (preferably on the Form PCT/RO/134 reproduced in annex Z of Volume I of the PCT Applicant's Guide). If such a request has been filed by the applicant any request made by a third party for the furnishing of a sample shall indicate the expert to be used. That expert may be any person entered on a list of recognized experts drawn up by the Swedish Patent Office or any person approved by a applicant in the individual case.

Netherlands

[1028] The applicant hereby requests that until the date of a grant of a Netherlands patent or until the date on which the application is refused or withdrawn or lapsed, the microorganism shall be made available as provided in the 31F(1) of the Patent Rules only by the issue of a sample to an expert. The request to this effect must be furnished by the applicant with the Netherlands Industrial Property Office before the date on which the application is made available to the public under Section 22C or Section 25 of the Patents Act of the Kingdom of the Netherlands, whichever of the two dates occurs earlier.

1-32. (canceled)

33. An isolated nucleic acid molecule comprising a first polynucleotide sequence at least 95% identical to a second polynucleotide sequence selected from the group consisting of:
(a) a polynucleotide fragment of SEQ ID NO:X as referenced in Table 1A;
(b) a polynucleotide encoding a full length polypeptide of SEQ ID NO:Y or a full length polypeptide encoded by the cDNA Clone ID in ATCC Deposit No:Z corresponding to SEQ ID NO:Y as referenced in Table 1A;
(c) a polynucleotide encoding a polypeptide fragment of SEQ ID NO:Y or a polypeptide fragment encoded by the cDNA Clone ID in ATCC Deposit No:Z corresponding to SEQ ID NO:Y as referenced in Table 1A;
(d) a polynucleotide encoding a polypeptide fragment of SEQ ID NO:Y or a polypeptide fragment encoded by the cDNA Clone ID in ATCC Deposit No:Z corresponding to SEQ ID NO:Y as referenced in Table 1A, wherein said fragment has biological activity;
(e) a polynucleotide encoding a polypeptide domain of SEQ ID NO:Y as referenced in Table 1B;
(f) a polynucleotide encoding a polypeptide domain of SEQ ID NO:Y as referenced in Table 2;
(g) a polynucleotide encoding a predicted epitope of SEQ ID NO:Y as referenced in Table 1B; and
(h) a polynucleotide capable of hybridizing under stringent conditions to any one of the polynucleotides specified in (a)-(g), wherein said polynucleotide does not hybridize under stringent conditions to a nucleic acid molecule having a nucleotide sequence of only A residues or of only T residues.

34. The isolated nucleic acid molecule of claim 33, wherein the polynucleotide fragment comprises a nucleotide sequence encoding a secreted form of SEQ ID NO:Y or a secreted form of the polypeptide encoded by the cDNA Clone ID in ATCC Deposit No:Z corresponding to SEQ ID NO:Y, as referenced in Table IA.

35. The isolated nucleic acid molecule of claim 33, wherein the polynucleotide fragment comprises a nucleotide sequence encoding the sequence identified as SEQ ID NO:Y or the polypeptide encoded by the cDNA sequence included in ATCC Deposit No:Z, which is hybridizable to SEQ ID NO:X, as referenced in Table 1A.

36. The isolated nucleic acid molecule of claim 33, wherein the polynucleotide fragment comprises the entire nucleotide sequence of SEQ ID NO:X or the cDNA sequence included in ATCC Deposit No:Z, which is hybridizable to SEQ ID NO:X, as referenced in Table 1A.

37. The isolated nucleic acid molecule of claim 34, wherein the nucleotide sequence comprises sequential nucleotide deletions from either the C-terminus or the N-terminus.

38. The isolated nucleic acid molecule of claim 35, wherein the nucleotide sequence comprises sequential nucleotide deletions from either the C-terminus or the N-terminus.

39. A recombinant vector comprising the isolated nucleic acid molecule of claim 33.

40. A method of making a recombinant host cell comprising the isolated nucleic acid molecule of claim 33.

41. A recombinant host cell produced by the method of claim 40.

42. The recombinant host cell of claim 41 comprising vector sequences.

43. A polypeptide comprising a first amino acid sequence at least 95% identical to a second amino acid sequence selected from the group consisting of:
(a) a full length polypeptide of SEQ ID NO:Y or a full length polypeptide encoded by the cDNA Clone ID in ATCC Deposit No:Z corresponding to SEQ ID NO:Y as referenced in Table 1A;
(b) a secreted form of SEQ ID NO:Y or a secreted form of the polypeptide encoded by the cDNA Clone ID in ATCC Deposit No:Z corresponding to SEQ ID NO:Y as referenced in Table 1A;
(c) a polypeptide fragment of SEQ ID NO:Y or a polypeptide fragment encoded by the cDNA Clone ID in ATCC Deposit No:Z corresponding to SEQ ID NO:Y as referenced in Table 1A;
(d) a polypeptide fragment of SEQ ID NO:Y or a polypeptide fragment encoded by the cDNA Clone ID in ATCC Deposit No:Z corresponding to SEQ ID NO:Y as referenced in Table 1A, wherein said fragment has biological activity;
(e) a polypeptide domain of SEQ ID NO:Y as referenced in Table 1B;
(f) a polypeptide domain of SEQ ID NO:Y as referenced in Table 2; and
(g) a predicted epitope of SEQ ID NO:Y as referenced in Table 1B.

44. The polypeptide of claim 43, wherein said polypeptide comprises a heterologous amino acid sequence.

45. The isolated polypeptide of claim 43, wherein the secreted form or the full length protein comprises sequential amino acid deletions from either the C-terminus or the N-terminus.

46. An isolated antibody that binds specifically to the isolated polypeptide of claim 43.

47. A recombinant host cell that expresses the isolated polypeptide of claim 43.

48. A method of making an isolated polypeptide comprising:
(a) culturing the recombinant host cell of claim 47 under conditions such that said polypeptide is expressed; and
(b) recovering said polypeptide.

49. The polypeptide produced by claim 48.

50. A method for preventing, treating, or ameliorating a gastrointestinal disorder, comprising administering to a mammalian subject a therapeutically effective amount of the polypeptide of claim 43.

51. A method of diagnosing a gastrointestinal disorder in a subject comprising:
(a) determining the presence or absence of a mutation in the polynucleotide of claim 33; and
(b) diagnosing the gastrointestinal disorder based on the presence or absence of said mutation.

52. A method of diagnosing a gastrointestinal disorder in a subject comprising:
(a) determining the presence or amount of expression of the polypeptide of claim 43 in a biological sample; and
(b) diagnosing the gastrointestinal disorder based on the presence or amount of expression of the polypeptide.

53. A method for identifying a binding partner to the polypeptide of claim 43 comprising:
(a) contacting the polypeptide of claim 43 with a binding partner; and
(b) determining whether the binding partner effects an activity of the polypeptide.

54. The gene corresponding to the cDNA sequence of SEQ ID NO:X.

55. A method of identifying an activity in a biological assay, wherein the method comprises:
(a) expressing SEQ ID NO:X in a cell;
(b) isolating the supernatant;
(c) detecting an activity in a biological assay; and
(d) identifying the protein in the supernatant having the activity.

56. The product produced by the method of claim 53.

The application's sequence listing, which the Patent Office published only in electronic form, follows.

SEQUENCE LISTING (650 sequences)

SEQ ID NO: 1 - DNA, 733 bp, Homo sapiens
gggatccggagcccaaatcttctgacaaaactcacacatgcccaccgtgcccagcacctgaattcgagggtgcaccgtcagtcttcctcttccccccaaaacccaaggacaccctcatgatctcccggactcctgaggtcacatgcgtggtggtggacgtaagccacgaagaccctgaggtcaagttcaactggtacgtggacggcgtggaggtgcataatgccaagacaaagccgcgggaggagcagtacaacagcacgtaccgtgtggtcagcgtcctcaccgtcctgcaccaggactggctgaatggcaaggagtacaagtgcaaggtctccaacaaagccctcccaacccccatcgagaaaaccatctccaaagccaaagggcagccccgagaaccacaggtgtacaccctgcccccatcccgggatgagctgaccaagaaccaggtcagcctgacctgcctggtcaaaggcttctatccaagcgacatcgccgtggagtgggagagcaatgggcagccggagaacaactacaagaccacgcctcccgtgctggactccgacggctccttcttcctctacagcaagctcaccgtggacaagagcaggtggcagcaggggaacgtcttctcatgctccgtgatgcatgaggctctgcacaaccactacacgcagaagagcctctccctgtctccgggtaaatgagtgcgacggccgcgactctagaggat

SEQ ID NO: 2 - protein, 5 aa, Homo sapiens
  Site (3): Xaa equals any amino acid
WSXWS

SEQ ID NO: 3 - DNA, 86 bp, Artificial Sequence
  Primer_Bind: Synthetic sequence with 4 tandem copies of the GAS binding site found in the IRF1 promoter (Rothman et al., Immunity 1:457-468 (1994)), 18 nucleotides complementary to the SV40 early promoter, and a Xho I restriction site.
gcgcctcgagatttccccgaaatctagatttccccgaaatgatttccccgaaatgatttccccgaaatatctgccatctcaattag

SEQ ID NO: 4 - DNA, 27 bp, Artificial Sequence
  Primer_Bind: Synthetic sequence complementary to the SV40 promter; includes a Hind III restriction site.
gcggcaagctttttgcaaagcctaggc

SEQ ID NO: 5 - DNA, 271 bp, Artificial Sequence
  Protein_Bind: Synthetic promoter for use in biological assays; includes GAS binding sites found in the IRF1 promoter (Rothman et al., Immunity 1:457-468 (1994)).
ctcgagatttccccgaaatctagatttccccgaaatgatttccccgaaatgatttccccgaaatatctgccatctcaattagtcagcaaccatagtcccgcccctaactccgcccatcccgcccctaactccgcccagttccgcccattctccgccccatggctgactaattttttttatttatgcagaggccgaggccgcctcggcctctgagctattccagaagtagtgaggaggcttttttggaggcctaggcttttgcaaaaagctt

SEQ ID NO: 6 - DNA, 32 bp, Artificial Sequence
  Primer_Bind: Synthetic primer complementary to human genomic EGR-1 promoter sequence (Sakamoto et al., Oncogene 6:867-871 (1991)); includes a Xho I restriction site.
gcgctcgagggatgacagcgatagaaccccgg

SEQ ID NO: 7 - DNA, 31 bp, Artificial Sequence
  Primer_Bind: Synthetic primer complementary to human genomic EGR-1 promoter sequence (Sakamoto et al., Oncogene 6:867-871 (1991)); includes a Hind III restriction site.
gcgaagcttcgcgactccccggatccgcctc

SEQ ID NO: 8 - DNA, 12 bp, Homo sapiens
ggggactttccc

SEQ ID NO: 9 - DNA, 73 bp, Artificial Sequence
  Primer_Bind: Synthetic primer with 4 tandem copies of the NF-KB binding site (GGGGACTTTCCC), 18 nucleotides complementary to the 5' end of the SV40 early promoter sequence, and a XhoI restriction site.
gcggcctcgaggggactttcccggggactttccggggactttccgggactttccatcctgccatctcaattag

SEQ ID NO: 10 - DNA, 256 bp, Artificial Sequence
  Protein_Bind: Synthetic promoter for use in biological assays; includes NF-KB binding sites.
ctcgaggggactttcccggggactttccggggactttccgggactttccatctgccatctcaattagtcagcaaccatagtcccgcccctaactccgcccatcccgcccctaactccgcccagttccgcccattctccgccccatggctgactaattttttttatttatgcagaggccgaggccgcctcggcctctgagctattccagaagtagtgaggaggcttttttggaggcctaggcttttgcaaaaagctt

SEQ ID NO: 11 - DNA, 2703 bp, Homo sapiens
ggcacgagatttcctacaggtgaaacgccatcattaggattcactgtaacgttagtgctattaaactcactagcatttttattaatggccgttatctacactaagctatactgcaacttggaaaaagaggacctctcagaaaactcacaatctagcatgattaagcatgtcgcttggctaatcttcaccaattgcatctttttctgccctgtggcgtttttttcatttgcaccattgatcactgcaatctctatcagccccgaaataatgaagtctgttactctgatattttttccattgcctgcttgcctgaatccagtcctgtatgttttcttcaacccaaagtttaaagaagactggaagttactgaagcgacgtgttaccaagaaaagtggatcagtttcagtttccatcagtagccaaggtggttgtctggaacaggatttctactacgactgtggcatgtactcacatttgcagggcaacctgactgtttgcgactgctgcgaatcgtttcttttaacaaagccagtatcatgcaaacacttgataaaatcacacagctgtcctgcattggcagtggcttcttgccaaagacctgagggctactggtccgactgtggcacacagtcggcccactctgattatgcagatgaagaagattcctttgtctcagacagttctgaccaggtgcaggcctgtggacgagcctgcttctaccagagtagaggattccctttggtgcgctatgcttacaatctaccaagagttaaagactgaactactgtgtgtgtaaccgtttcccccgtcaaccaaaatcagtgtttatagagtgaaccctattctcatctttcatctgggaagcacttctgtaatcactgcctggtgtcacttagaagaaggagaggtggcagtttatttctcaaaccagtcattttcaaagaacaggtgcctaaattataaattggtgaaaaatgcaatgtccaagcaatgtatgatctgtttgaaacaaatatatgacttgaaaaggatcttaggtgtagtagagcaatataatgttagttttttctgatccataagaagcaaatttatacctatttgtgtattaagcacaagataaagaacagctgttaatattttttaaaaatctattttaaaatgtgattttctataactgaagaaaatatcttgctaattttacctaatgtttcatccttaatctcaggacaacttactgcagggccaaaaaagggactgtcccagctagaactgtgagagtatacataggcattactttattatgttttcacttgccatccttgacataagagaactataaattttgtttaagcaatttataaatctaaaacctgaagatgtttttaaaacaatattaacagctgttaggttaaaaaaatagctggacatttgttttcagtcattatacattgctttggtccaatcagtaattttttcttaagtgttttgtgattacactactagaaaaaaagtaaaaggctaattgctgtgtgggtttagtcgatttggctaaactactaactaatgtgggggtttaatagtatctgagggatttggtggcttcatgtaatgttctcattaatgaatacttcctaatatcgttggctctactaatattttccaatttgctgggatgtcacctagcaatagcttggattatatagaaagtaaactgtggtcaatacttgcatttaattagacgaaacggggagtaattatgacacgaagtacttatgtttatttcttagtgagctggattatcttgaacctgtgctattaaatggaaatttccatacatcttccccatactattttttataaaagagcctattcaatagctcagaggttgaactctggttaaacaagataatatgttattaataaaaatagaagaagaaagaataaagcttagtcctgtgtctttaaaaattaaaaattttacttgattcccatctatgggctttagacctattactgggtggagtcttaaagttataattgttcaatatgttttttgaacagtgtgctaaatcaatagcaaacccactgccatattagttattctgaatatactaaaaaaatccagctagattgcagtttaataattaaactgtacatactgtgcatataatgaatttttatcttatgtaaattatttttagaacacaagttgggaaatgtggcttctgttcatttcgtttaattaaagctacctcctaaactatagtggctgccagtagcagactgttaaattgtggtttatatactttttgcattgtaaatagtctttgttgtacattgtcagtgtaataaaaacagaatctttgtatatcaaaatcatgtagtttgtataaaatgtgggaaggatttatttacagtgtgttgtaattttgtaaggccaactatttacaagttttaaaaattgctatcatgtatatttacacatctgataaatattaaatcataacttggtaagaaactcctaattaaaaggttttttccaaaattcaggttattgaaaatttttcattttattcatttaaaaactagaataacagatatataaaagtgttaatctttgtgctatatggtatgaaatacaatattgtactcagtgttttgaattattaaagtttctagaaagcaaaaaaaaaaaaaaaaaaa

SEQ ID NO: 12 - DNA, 760 bp, Homo sapiens
  misc_feature (13)..(13): n equals a,t,g, or c
  misc_feature (300)..(300): n equals a,t,g, or c
  misc_feature (425)..(425): n equals a,t,g, or c
cggacgcgtgggncggacgcgtggggaaaaaataacaaaacaaaaaacaagaaaaaaaaaacacaaaaccccgtaaaatcacaaagaaaatccaacaccaaaggcgcagaagccggctggccgtggtgggggcagcgtaggcgtasatccctctcctctcacttagcctgttgactcttgttattatcatgatattcacaaaacgccgcatgtttaaaaagtcatagatgtcatcttctctctgcccccagggaggaaagccaccttctcttgccccttggcccctttgtcaggggccangggtctgccgggtgggggtgccaacaggcctggccctttcctcccctgcatccagccatgggggcctctgcgattgccggaaggttgcatggctggtcccagggccagcacaggcccgaggccgngctgcctggttttatttttatttaactttattttctgttttatgagtgtgtgtccgcccacccccacccccttcagtgttaagtggggagccctgggggagtctctcctgcctcccagcctctcccaagacctcccccctcgtcaccagccatccctctggaccaggcagagggcggaccgggtgggcaggggcctgagggtggctcgggccagcccaccagccaatggacccctcctcaggccgccagtgtcgccctgcccctttttaaaacaaaatgccctcgtttgtaaacccttagacgcttgagaataaaccccttccttttcttccaaa

SEQ ID NO: 13 - DNA, 1445 bp, Homo sapiens
ggcacgagggatttgaacaagatcattagaattcaaaaaacaccagaaatgaaagatctttcctgaagctgtttaggaatattcatgatatacccttaactgttctagagaacaaaatgcgtctgtgctccttcacaaaagtccctatgaatttgtttctcaatgtgatccttcttaagttctataactttttgttttcattaattttaggaaaatcctgccttgcttcgttgggcctatgcaagaacaataaatgtctatcctaatttcagacccactcctaaaaactcactcatgggagctctgtgtggatttgggcccctcatcttcatttattatattatcaaaactgagagggtaagtattcagaccagatgtttagtatttgagtgataggttcactttctagggaccagctgcagctccttctcttgaagattgccaccagtgcccctcccaccttggggctgtcctctgccttcccttcctctcttcttttatctttattcctttccagcaggagttaaaacagaaagttttcagtcacctttgtctatttttgttagttcatttgttttttaaaaagatgatgtttattgggttaagtattagcagaatacataaatcatttagtacgtttcctgtttgcgtgaattctatttatgttggtcacattttgcaaattaatgttaaaacctattaatactctacgggacagagaagcacaagctgcctgtgtggggaatagctgccgtcagcagcctgggtatatgattggagagaaagtcaagctgatctttggcaccaaaccattccacatctggtactaaaccctgagctgcagcccccaggcttgtgttgccactggagcccactcgtctagctttgtctttaactggcccatctgcattcccattagagttcgtgtattttgattatctggtgaatgatctacttaacagaaaggtagtccacattttcccagaaagtgtttgcattttgctttcaatatatggttttatgggataatatatttctaatgactaaaatgtgagtaagatgtttttgaataggagcattttcttactgtgtctttagttcctcggattactgtttcttcgcacactccctgggctttagacagtgggattgcaattaggtttggagtgtttcattctgtttgtcagttgtacggtgggttgtgccaaaatgcagtttttcttaccttttttatttatttatttttatctaatatagccaactggcagaatatattgtctttaatgtactttttttctgtctttacaggataggaaagaaaaacttatccaggaaggaaaattggatcgaacatttcacctctcatattaagtctggcaatgatgactatatgtattcctgcctaaataaatcatctattaatcattaaaaaaaaaaaaaaaaaa

SEQ ID NO: 14 - DNA, 1333 bp, Homo sapiens
  misc_feature (411)..(411): n equals a,t,g, or c
  misc_feature (1264)..(1264): n equals a,t,g, or c
  misc_feature (1319)..(1319): n equals a,t,g, or c
cctggaacacttcaacaaccagtatccagccgcagaggtggtgaactttggcacctggttcctcttcagcttccccatatccctcatcatgctggtggtcagctggttctggatgcactggctgttcctgggctgcaattttaaagagacctgctctctgagcaagaagaagaagaccaaaagggaacagttgtcagagaagagsmtccaagaagaatatgaaaaactgggagacattagctacccagaaatggtgactggwtttttcttcatcctgatgaccgtactgtggtttamccgggagcctggctttgtccctggctgggattctttctttgaaaagaaaggctaccgtactgatgccacagtctctgtcttccttggcttcctcctcttcctcattccagcganagaagccctgctttgggaaaaagaatgatggagagaaccaggagcactcactkgggaccgagcccatcatcacgtggaaggacttccagaagaccatgccctgggagattgtcattctggttgggggaggctatgctctggcttctggtagcaagagctctggcctctctacatggattgggaaccagatgttgtccctgagcagcctcccaccgtgggctgtcaccctgctggcatgcatcctcgtgtccattgtcactgagtttgtgagcaacccagcaaccatcaccatcttcctgcccatcctgtgcagcctgtctgaaacgctgcacattaaccccctctacaccctgatcccagtcaccatgtgcatctcctttgcagtgatgctgcctgtgggcaatccccctaatgccatcgtcttcagctatgggcactgccagatcaaagatatggtgaaagctggcctgggagtcaacgttattggactggtgatagtaatggtggccatcaacacctggggagttagcctcttccacctggacacttacccagcatgggcgagggtcagcaacatcactgatcaagcctaacgccaagtgtacaaactggcccaaccacaggagctgccagtatccagcagtatctggaccacaggcaaagaaaaccactaggaccaccaggagcacacaaccccagacccacgccggagggcatccctccaccagaagattccgccacctcaagtgaactgcaggaatcctccaacaaccacaaacacatgcttcgctgttagtgtcttcttcctgccctcagcaccacagctcaagaaaacctaaagtttcaatacaanccataggctcacaaaaaaaaaaaaaaaaaaaaaaaaaaaaaaaaaaaaaaaaaanaaaaaaaaaaaaaa

SEQ ID NO: 15 - DNA, 751 bp, Homo sapiens
  misc_feature (1)..(1): n equals a,t,g, or c
natcattttctgtcccctcctatcttaggctgaccggttccctgatgtgttacctgcttctgctactgatccaaactgcagaacttctcattcatccccaaggcctccaggcagtatccaatggggaatcagctctaaaaggaaccagaccaacgttttccagccccttcattctggtgactgaggggaggaaagaatgggagggggtattcttgtctagtggatggaaaggaaacacactgtcaaattactatatctccttggttttctattacagtagaattctccagccatatttttattgtctatgggggaagttggagatggtgaccttgattagaagtgtctggagggggataaatggaggggataagattcagttggttttggaaaatgttaaagtcttaaaataatgcgtccatctgaagaattttttctaaaaccagagtttataaaaatatcactgatacagcctgccccctcatttccctgccacaggagatgtcttggactagagacacttgtttaataatagcttgtctctgatattcccagtagcttccctctgtgtgaggaaaggatagaaatgttcaggacatcatcatacaggctcctcatctacaaagttccagtagcagtgacgcctacacggaagacttggaactgcaaacaggctggggtcacctcagtgacatctgacgctgtccaaccagaagttcgatttttgttctgggggtgaaggaggaaacag

SEQ ID NO: 16 - DNA, 2849 bp, Homo sapiens
  misc_feature (1)..(1): n equals a,t,g, or c
ngggctgcaaggacctgagctcagcttccgccccagccagggaagcggcaggggaaagcaccggctccaggccagcgtgggccgctctctcgctcggtgcccgccgccatgtgggccgtcctgaggttagccctgcggccgtgtgcccgcgcctctcccgccgggccgcgcgcctatcacggggactcggtggcctcgctgggcacccagccggacttgggctctgccctctaccaggagaactacaagcagatgaaagcactagtaaatcagctccatgaacgagtggagcatataaaactaggaggtggtgagaaagcccgagcacttcacatatcaagaggaaaactattgcccagagaaagaattgacaatctcatagacccagggtctccatttctggaattatcccagtttgcaggttaccagttatatgacaatgaggaggtgccaggaggtggcattattacaggcattggaagagtatcaggagtagaatgcatgattattgccaatgatgccaccgtcaaaggaggtgcctactacccagtgactgtgaaaaaacaattacgggcccaagaaattgccatgcaaaacaggctcccctgcatctacttagttgattcgggaggagcatacttacctcgacaagcagatgtgtttccagatcgagaccactttggccgtacattctataatcaggcaattatgtcttctaaaaatattgcacagatcgcagtggtcatgggctcctgcaccgcaggaggagcctatgtgcctgccatggctgatgaaaacatcattgtacgcaagcagggtaccattttcttggcaggaccccccttggttaaagcggcaactggggaagaagtatctgctgaggatcttggaggtgctgatcttcattgcagaaagtctggagtaagtgaccactgggctttggatgatcatcatgcccttcacttaactaggaaggttgtgaggaatctaaattatcagaagaaattggatgtcaccattgaaccttctgaagagcctttatttcctgctgatgaattgtatggaatagttggtgctaaccttaagaggagctttgatgtccgagaggtcattgctagaatcgtggatggaagcagattcactgagttcaaagccttttatggagacacattagttacaggatttgctcgaatatttgggtacccagtaggtatcgttggaaacaacggagttctcttttctgaatctgcaaaaaagggtactcactttgtccagttatgctgccaaagaaatattcctctgctgttccttcaaaacattactggatttatggttggtagagagtatgaagctgaaggaattgccaaggatggtgccaagatggtggccgctgtggcctgtgcccaagtgcctaagataaccctcatcattgggggctcctatggagccggaaactatgggatgtgtggcagagcgtatagcccaagatttctctacatttggccaaatgctcgtatctcagtgatgggaggagagcaggcagccaatgtgttggccacgataacaaaggaccaaagagcccgggaaggaaagcagttctccagtgctgatgaagcggctttaaaagagcccatcattaagaagtttgaagaggaaggaaacccttactattccagcgcaagggtatgggatgatgggatcattgatccagcagacaccagactggtcttgggtctcagttttagtgcagccctcaacgcaccaatagagaagactgacttcggtatcttcaggatgtaactggaataaaggatgttttctgttggacatgtactgaaaattaacacatgtagtagccttaaaattttagacttctcgaacatgaggctgttacagtaatttttttaacactgtgcattgtacttttctaccttaaaaaaatcagtgaggatatttatttaatgaacatcaattccttttaaattttcttagagaaatttctctgtggctcagttttaccacccataaagcggagacagtaatttatggttatcctttctgacccacaaagtatgaaaagttctgtaatctgtaaactcagttctgtaatctgtattattgagatgattaatataaagttgtattttcactgaaactgattgtcattgctgagttatgctatggtgatactttcacgcgggctataattttatgacaaggcatctgttacttcagctggccataaagtgccctcaacactgctgtgcagaccatcaccaccattcatctccagaattggtactcagtaccaaactgcaaactatagcgattcaaacaacagtgctccccaatttcaccactaccacgagcccatgacatctactatatatcatactgagtctgagaaagcgatgtaaccacaatagacacaaaccagacaatacgaaagaataaatacacgactccaccgaagcaacacaacacccagaagatcaaacaagactatgcgccaccacaccacccaaacagcaggaacaaagagaacctaagaaaaacaccacaaacaagaatctacacaacaaacgcaacatcaacaagatagccaaggatagactacacaaaaagccatagaggaacctcggactggtcaccaagagcagaacaaccgacaacacacaatacagtacaaacaagacaaacgctggacaagcgagtaaaaagatgaagaaaaaacgaagaatcaacaacaggagaagtatatgaaaacaacaccaacgcaagaacacaacagtctgaacgacagagacaaatactaaaacgacaaacgtcagctactattaaccgaaaaa

SEQ ID NO: 17 - DNA, 755 bp, Homo sapiens
  misc_feature (1)..(1): n equals a,t,g, or c
  misc_feature (733)..(734): n equals a,t,g, or c
natttcccgttcagttattccggtgacactatagaaggtacgcctgcaggtaccggtccggaattcccgggtcgacccacgcgtccgaactcctgaaacagtgaggacatctcacagaccagacaggagctggggctctgcatctcacagcggtgcctgtcagacaggaagaagtcccgcagaagtggcgtgtgggtcagggcctgcacgatgcagttcatgaagcatgtgttcccaaggttgatcagcccacgcagacctatggtgcagttcgaggtgatctttctccttttcgggttgtgcttcagcagttcaagctcccgtttggttggttcccaagttgaaaacttctctccaacgccttgcattttccaagcttttcgctgctcctccttggcgattatttccatgtctttgtcatagatgtagtcctggcacagaaaacagtagatgcctccgtacatcagatcaatggccaggttgtgccgcttcgccttcgcatgctcgtgaatatgcttctttgtgaaacagccgaagaagacacagtagaggcaggaatgcagcctgttgaggtggacgccacagacatggcagatacaggacttggccttgcgcttgcgggcctcagccgtgccgctccacacgaagcactggtagatggcccgcaggttctgcttccagttgtccaccttgaagctgcccaggtgcgagcagcccggcggcgctaccgccnnctcggcgtccatggcctcgcc

SEQ ID NO: 18 - DNA, 4129 bp, Homo sapiens
ccacgcgtccgctttttctcaggatgaatattttcctggccgactcattgatccttggtacaaataaacttctggaagacccagagagaggaaaacacaggagaaattgagcgatgtacgtacatcaaataccactactcctcagcaaccatccccaggaacctcactttcaatatcacgaagaccatccgtcaggatgagtggcatgccctacacctgcgcagaatgacggctggcttcatgggcatggcggtggccatcatcctctttggctggatcatcggcgtgctgggctgctgctgggaccgaggccttatgcagtacgtggcaggctgctcttcctcatgggagggaaaacagtggaattaaagagtgtctgccccagcccggcagggtgaagtaggatggggaaaacgttctcaccagaccctgggacttctatgctgcagcatcgtgacctgaggggtggatgcagttgccacagctctttgaggcaaaggccccgatgctctgtggacagcctcaggcttgggatggatttggcagtgaggaacttattgtaacagaagaaagtcatccaagatgcctgaggaaagaaaccttcaattgagccagccggctggaaaatgtggccaagaaaaccgcagagaccaatgttcggaggagaaaaccagaaagaggggcctgcctggcccctttgatcctttatggccgattccgtggacattgctgctcctcacgccggcagcctctcttgagtacctcaattgcagtctccagaccctcaccccgcaggcattcctgggtcggtgtcccagtcggtcacagtcatggatcctctgcagagcagtagaaagtcgggaggggcccgtgcccatggtcaggaaaggagcggcaggaggaaagaggagcatgagaactcagaagaaattgtacctactcagatgtggagtgaggatagacgttcccagattcaaaggcatcatgaagtgtcatgacaagatagaaaagactttgggctggccaagaaggaactggataaaattatgagtgaggtacagcaggtgggaacagtgtcactgaaccctatcaacagcagagcatgagaacgtgaattcctgctgctggggaggcaatgaaatgatatgggccttcagatgtctatgaatcctgacccaccgtgggtgccagttttcaagagggcttcccatcaaatattgtgcgcaaaggatggatggatgaaaggaagagtgagccaataaacgagggaacgccgggaaaggcagcctcaagccggtgggccctggcacccccaccgtccctgagcatcgagccggttcccgccccggcccgaactggcccgcgcgcgctcgcagccccgcggcggaacccgagggcggcggcagcggttccttgaacgagccggggaatctggagggagcacacaggaaaggcagagccgcgagctggaccagccgtgcaaatctctagaagatgacggtgttctttaaaacgcttcgaaatcactggaagaaaactacagctgggctctgcctgctgacctggggaggccattggctctatggaaaacactgtgataacctcctaaggagagcagcctgtcaagaagctcaggtgtttggcaatcaactcattcctcccaatgcacaagtgaagaaggccactgttttctcaatcctgcagcttgcaaaggaaaagccaggactctatttgaaaaaaatgctgcccgattttacatttatctggcatggatgtgactattgtaagacagattatgagggacaagccaagaaactcctggaactgatggaaaacacggatgtgatcattgttgcaggaggagatgggacactgcaggaggttgttactggtgttcttcgacgaacagatgaggctaccttcagtaagattcccattggatttatcccactgggagagaccagtagtttgagtcataccctctttgccgaaagtggaaacaaagtccaacatattactgatgccacacttgccattgtgaaaggagagacagttccacttgatgtcttgcagatcaagggtgaaaaggaacagcctgtatttgcaatgaccggccttcgatggggatctttcagagatgctggcgtcaaagttagcaagtactggtatcttgggcctctaaaaatcaaagcagcccactttttcagcactcttaaggagtggcctcagactcatcaagcctctatctcatacacgggacctacagagagacctcccaatgaaccagaggagacccctgtacaaaggccttctttgtacaggagaatattacgaaggcttgcgtcctactgggcacaaccacaggatgccctttcccaagaggtgagcccggaggtctggaaagatgtgcagctgtccaccattgaactgtccatcacaacacggaataatcagcttgacccgacaagcaaagaagattttctgaatatctgcattgaacctgacaccatcagcaaaggagactttataactataggaagtcgaaaggtgagaaaccccaagctgcacgtggagggcacggagtgtctccaagccagccagtgcactttgcttatcccggagggagcagggggctcttttagcattgacagtgaggagtatgaagcgatgcctgtggaggtgaaactgctccccaggaagctgcagttcttctgtgatcctaggaagagagaacagatgctcacaagccccacccagtgagcagcagaagacaagcactctgagaccacactttaggccaccggtgggaccaaaagggaacaggtgcctcagccatcccaacagtgtcgtcagagggtccccagggcattttcatggcaagtacccctctgcccccactccagcagtgcttcccaaagtgtgctctgtcacctgctttgcaatcggcttccattagcgcatgttttattttggtgtgacggttggccctcctaaacacggactttcctcaggctggttcaagacggaaaaggactttcttctgttttcttccaaagtgcaaccacagtggagagcccacggtgggcttagcctgcctaggcccttccatttctcttctttgaccgtgctaggaattccaggaaagtgcattcctgccctggtgaccttttcctatgtctaggctcctccacaggtgctgctattttgtgagctccggctcctgtttagcttttatttcagttctaacctcagtccagaaacatatgtgaggttgtttccctcttcagccacggctacaataccggaaaatgctagtttttatttatttttttaagtagtgcttcctaaatggtttgcatgagagccacctggggtacatgttgaaaacttatttggggtctaccccaaacctaataacccaaatttggggatggggcccaggaatatgcatttttaaaaagtcatctgcccttcccaggtgattctgtaagttgtccctcaactgtacttggagaaatcgtgttttaaagcagtagtccacaaagtattctgctcatgtgcccccaaaagtattttgaaaaatcatgtataccctcacccatctaagttgatatctaaaattttatctaagttggtatctaaaatttttcatgggaagttaaatagttgacaaagtatgtatttgctggtgtcgtgtaaatattggtattttaaaataaaaactgttacatcactattttaaacatatccagtacaatttaaatatcacaacaatttgacacccttcattcatttataaaaataaatgagctagttctttagtagttaaacatttcaaattggcttttctccttctgtatttccataccacttttcagccaagaatcctatcataatgtaatctattatgcccgacatctttttaatcaattcaccccattacttcttgtcaacaaaaaatataaatggaaattttttttttagctcttgctttaagtgtttgtttgttatctcagtccagaaccaatattatcgtaattaattattggtatataatgaaaacggtattaattcttggatgattaaaagtttttttattagaatgttaaaaaaaaaaaaaaaaaaaaaa

SEQ ID NO: 19 - DNA, 1674 bp, Homo sapiens
  misc_feature (1649)..(1649): n equals a,t,g, or c
  misc_feature (1663)..(1663): n equals a,t,g, or c
  misc_feature (1665)..(1665): n equals a,t,g, or c
caagttggtacgcctgcaggtaccggtccggaattcccgggtcgacccacgcgtccggtcgaagataggttcgagacggtggatgttgcagctgatcatgcagttgggttcggtgctgctcacacgctgccccttttggggctgcttcagccagctcatgctgtacgctgagagggctgaggcacgccggaagcccgacatcccagtgccttacctgtatttcgacatgggggcagccgtgctgtgcgctagtttcatgtcctttggcgtgaagcggcgctggttcgcgctgggggccgcactccaattggccattagcacctacgccgcctacatcgggggctacgtccactacggggactggctgaaggtccgtatgtactcgcgcacagttgccatcatcggcggctttcttgtgttggccagcggtgctggggagctgtaccgccggaaacctcgcagccgctccctgcagtccaccggccaggtgttcctgggtatctacctcatctgtgtggcctactcactgcagcacagcaaggaggaccggctggcgtatctgaaccatctcccaggaggggagctgatgatccagctgttcttcgtgctgtatggcatcctggccctggcctttctgtcaggctactacgtgaccctcgctgcccagatcctggctgtactgctgccccctgtcatgctgctcattgatggcaatgttgcttactggcacaacacgcggcgtgttgagttctggaaccagatgaagctccttggagagagtgtgggcatcttcggaactgctgtcatcctggccactgatggctgagttttatggcaagaggctgagatgggcacagggagccactgagggtcaccctgccttcctccttgctggcccagctgctgtttatttatgctttttggtctgtttgtttgatcttttgcttttttaaaattgttttttgcagttaagaggcagctcatttgtccaaatttctgggctcagcgcttgggagggcaggagccctggcactaatgctgtacaggtttttttcctgttaggagagctgaggccagctgcccactgagtctcctgtccctgagaagggagtatggcagggctgggatgcggctactgagagtgggagagtgggagacagaggaaggaagatggagattggaagtgagcaaatgtgaaaaattcctctttgaacctggcagatgcagctaggctctgcagtgctgtttggagactgtgagagggagtgtgtgtgttgacacatgtggatcaggcccaggaagggcacaggggctgagcactacagaagtcacatgggttctcagggtatgccaggggcagaaacagtaccggctctctgtcactcaccttgagagtagagcagaccctgttctgctctgggctgtgaaggggtggagcaggcagtggccagctttgcccttcctgctgtctctgtttctagctccatggttggcctggtgggggtggagttccctcccaaacaccagaccacacagtcctccaaaaataaacattttatatagamaaaaaaaaaaaaaaaaagggcggccgctctagaggatccctcgaggggcccaagcttacgcgtgcatgcgacgtcatagctctntccctatagaagtngnaaagggttc

SEQ ID NO: 20 - DNA, 2005 bp, Homo sapiens
ggttgctggcccaggtgagcgggcgcgctggtccaggtgagcgggcgcgtccccgcgacggcgctgcctgcccgaggcggttcacgtaaagacagcgagatcctgagggccagccgggaaggaggcgtggatatggagctggctgctgccaagtccggggcccgcgccgctgcctagcgcgtcctggggactctgtggggacgcgccccgcgccgcggctcggggacccgtagagcccggcgctgcgcgcatggccctgctctcgcgccccgcgctcaccctcctgctcctcctcatggccgctgttgtcaggtgccaggagcaggcccagaccaccgactggagagccaccctgaagaccatccggaacggcgttcataagatagacacgtacctgaacgccgccttggacctcctgggaggcgaggacggtctctgccagtataaatgcagtgacggatctaagcctttcccacgttatggttataaaccctccccaccgaatggatgtggctctccactgtttggtgktcatcttaacattggtatcccttccctgacaaagtgttgcaaccaacacgacaggtgctatgaracctgtggcaaaagcaagaatgactgtgatgaagaattccagtattgcctctccaagatctgccgagatgtacagaaaacactaggactaactcagcatgttcaggcatgtgaaacaacagtggagctcttgtttgacagtgttatacatttaggttgtaaaccatatctggacagccaacgagccgcatgcaggtgtcattatgaagaaaaaactgatctttaaaggagatgccgacagctagtgacagatgaagatggaagaacataacctttgacaaataactaatgtttttacaacataaaactgtcttatttttgtgaaaggattattttgagaccttaaaataatttatatcttgatgttaaaacctcaaagcaaaaaaagtgagggagatagtgaggggagggcacgcttgtcttctcaggtatcttccccagcattgctcccttacttagtatgccaaatgtcttgaccaatatcaaaaacaagtgcttgtttagcggagaattttgaaaagaggaatatataactcaattttcacaaccacatttaccaaaaaaagagatcaaatataaaattcatcataatgtctgttcaacattatcttatttggaaaatggggaaattatcacttacaagtatttgtttactatgaaattttaaatacacatttatgcctagaaggaacggactttttttttctattttaattacacataatatgtaattaaagtmcaacataatatgttgtttctctgtagcccgttgagcatatgagtaagtcacatttctattaggactacttmcaaggacaaggtttccatttttccagttgtaaaattggaaccatcagctgataacctcgtagggagcaaccccaggatagctaagtgttatgtaatatgcctagaaggtgatgtgaatgcgattcagaagcatagccactcccattttatgagctactcacatgacaaatgtcatcttttgctataacctttgccaagttagagaaaagatggatttaatgagataaatgaaaagatatttamcctaatatatcaaggcactatttgctgttatgctttgttatttatttcccagcacttgttccttattgtagattttttaaagactgtaaccttttactaactgtggtcttactaaaatttgtgcttgatactgcttttcaaaaagcctttaattagagccaaaaggatggaaaaggcaagatataaatgccttttatagatctcttatttacattgaaaattattaccatatgtttagagcaaatccaagaaaacttcaacagcttctgaagatgtctatgaatgttgaaaacttttcaatstcttggratgctcakttaattcgcagaccggcttaacggattaaacgccccccccc

SEQ ID NO: 21 - DNA, 812 bp, Homo sapiens
  misc_feature (17)..(17): n equals a,t,g, or c
  misc_feature (108)..(108): n equals a,t,g, or c
gaccatttttagccaancttggaattaaccctcacttaagggaacaaaagctggagcttccaccgcgttggcggccgctctagaactagtggatcccccgggctgcangaattcggccacgagaggacttccccacctcatgcagctatttgggccgtggcgtctgaaatttattatttcagagtcacccctttratgaccttggcagtgractgcagtcatctgtttaggcctttccatggcccacgtcaatgccgttatttctgtttgttgcacatttgatttccttgttgttggcatttagaaggccccctgcttcccagatcacaccacgggcatggaccacagagattgcatcttgtgagtctgtagaaatggtcaaggccttgtcctctcttaggtccagagctcaggtgaatgcagattttcccggccatctgtgctgaagtccctgtggggaggctcctggctggtttcctgtaggtagacagctacacgtcctgcccttcattggcttcttttcatgaagctcctgccatctacaaaacatgtctcccttcttgaatcacatctctgttattgaagctctggaagtcaaccgggcgtggtggctatgcctataatcccagcattttgggatgccggggcgggtggatcacctgaggtcaggagttcgggaccagcctggccaacatggcgaaaccccgtctctaatacaagtgcaaaaattggccaggcgtggtggtcactgtgctccagcctgggtgacagagcgagctccgtctcaaaaaaaaaaaaaaaaaaaactcgag

SEQ ID NO: 22 - DNA, 910 bp, Homo sapiens
ggcagagctggccttcgactcgctatgtccactaacaatatgtcggacccacggaggccgaacaaagtgctgaggtgaggaccccagcgtcgtgggcacgggttcgggttgtgggtgtggatcggggccctgggaagcgcctgtctatcccgggggcaggacctgagcgcccctgaccctcgagcctgtcgcaggtacaagcccccgccgagcgaatgtaacccggccttggacgacccgacgccggactacatgaacctgctgggcatgatcttcagcatgtgcggcctcatgcttaagctgaagtggtgtgcttgggtcgctgtctactgctccttcatcagctttgccaactctcggagctcggaggacacgaagcaaatgatgagtagcttcatgtgagacttgccctacagaacaagtgactcttgagtaaggggtggggggaccccagcctggccatcctagactgacacctctctcctgtcttcatgctgtccatctctgccgtggtgatgtcctatctgcagaatcctcagcccatgacgcccccatggtgataccagcctagaagggtcacattttggaccctgtctatccactaggcctgggctttggctgctaaacctgctgccttcagctgccatcctggacttccctgaatgaggccgtctcggtgcccccagctggatagagggaacctggccctttcctagggaacaccctaggcttacccctcctgcctcccttcccctgcctgctgctgggggagatgctgtccatgtttctaggggtattcatttgctttctcgttgaaacctgttgttaataaagtttttcactctgaaaaaaaaaaaaaaaaaaaaaaactygrgggggggcccggaacccaattcsccggatagtgagt

SEQ ID NO: 23 - DNA, 821 bp, Homo sapiens
gttttgagtgtgtgaattacatatatgaacatctgaraaaatcctataagcagtttaatcaactgttccactccactccaagtgagtccataggcagaattgagttatggggagagcggcctagtaataattggtttgcgtaatacaaagttctactgggtagtgatgttgtagaagttcatatagaatcagctgagctttcagaaatggtgaaagggtggtaatagtcataacttagattgtaatttttttcccataggcttttaaaaaatattcatgaggttctttttttatttcaatagtttttggggaacaggtggtttttggttacatgataagttcttcagtggtgatttctgagattttggtgcacctgtcatgtgagcagtatgaactctactttatgtgtagtcttatccctcatgtgtatgaactccaccttatgtgtagtcttatccctcacccactcctgcccttccccacaagtccccaaagtccattatatgatctttatgcctttacatcttcacagtttagctctcacacaacttattataatttataagtaagccagcattggatatagttgtattccattattaatttaagaaaccttatgcaagtaattattagtcatcatcccaaaaaaaagggagaacagggttagattcagaatactttgataagagctaaatactatcatgagtgctgtcagtctgtagtaactttccattggtattctatgtcttttaggcttacagatactttttacactcttacaaaatgtgcacaagaagaagctgcagctcagagctcgtgcc

SEQ ID NO: 24 - DNA, 981 bp, Homo sapiens
acggaagcgcagagcacggaccccgccccctcgcggccccgctcgtgacgtcgcggggggcgccggcctccgcccggccccgagggcaggctctccccggaggctcagccccctctgctccccatgggcaactgccaggcagggcacaacctgcacctgtgtctggcccaccacccacctctggtctgtgccactttgatcctgctgctccttggcctctctggcctgggccttggcagcttcctcctcacccacaggactggcctgcgcagccctgacatcccccaggactgggtctcttttttgagatcttttggccagctgaccctgtgtcccaggaatgggacagtcacagggaagtggcgagggtctcacgtcgtgggcttgctgaccaccttgaacttcggagacggtccagacaggaacaagacccggacattccaggccacagtcctgggaagtcagatgggattgaaaggatcttctgcaggacaactggtccttatcacagccagggtgaccacagaaaggactgcaggaacctgcctatattttagtgctgttccaggaatcctaccctccagccagccacccatatcctgctcagaggagggggctggaaatgccaccctgagccctagaatgggtgaggaatgtgttagtgtctggagccatgaaggccttgtgctgaccaagctgctcacctcggaggagctggctctgtgtggctccaggctgctggtcttgggctccttcctgcttctcttctgtggccttctctgctgtgtcactgctatgtgcttccacccgcgccgggagtcccactggtctagaacccggctctgagggcactggcctagttcccgacttgtttctcaggtgtgaatcaacttcttgggccttggctctgagttggaaaaggttttagaaaaagtgaagagctggaatgtgggggaaaataaaaagcttttttgcccaaaa

SEQ ID NO: 25 - DNA, 1038 bp, Homo sapiens
  misc_feature (2)..(2): n equals a,t,g, or c
gnaattcggcacgagttaatgtataaaatatttctataatgaattttaatgggaattagagcatcatagaaaaaatgctcttactgttgaaaacattatttgttacattttggtcaactaatctttcaataacttttagtaactataatgttaagttgtaccagtggcagtcttatatagtaaatggcagctgacagcatgaaaataacatatctaatattttgtgactatcttattaggaaaatcagagaatttcaaaaccttgttagtttttagggtatagtcacattttataaatgtgcggtatatttatacatgatttgacgtttgtgwaaatattttccctggacttttattttagatgagatctacagtgtaggcaaacttatataatctgtcaactccattagtgtcatagtcagactcatccccatgctaaaattatagttgtkaaaatacgcttttgtaaatagttgtgttaggtcattatcaccaagtcttcaaggkattacattataaaaaccttggkttttattcttgtgaatamccgttttttccatgcaaagttaaaattcttcagcctttaatttttttattaatatataaggatgtgatgagtatgactacaaaacaggaaaaaataaacagatttcgtttgtggcttttgctaaattgttacctgacaaaatcttagccagttcttcattttcgttttgagatgaagatacttagttttagtccaggggctgggcgcgatagctgatgcctgtggtcccagtgctttgcggggccgaggcaggtggatcacttaaggtcaggagtttgagaccagcctgcccaacatggtgaaacgttgtctctactaaaaatacaaaaattagacaggcgtggtggcacacatctgtaattccagctactcaggaggctaacacaggaaaattccttgaacctgggaggcagaggttgcagtgagccattgcactccagcctgggcaacacagtgagactcttgtctcaaaaaaaaaaaaaaaaactcga

SEQ ID NO: 26 - DNA, 843 bp, Homo sapiens
ggcagctgtccaccgatcccggccaccgcccccggccacccccaccccgcgagcccatggaggctccgggaccccgcgccttgcggactgcgctctgtggcggctgttgctgcctcctcctatgtgcccagctggctgtggctggtaaaggagctcgaggctttgggaggggagccctgatccgcctgaatatctggccggcggtccaaggggcctgcaaacagctggaggtctgtgagcactgcgtggagggagacagagcgcgcaatctctccagctgcatgtgggagcagtgccggccagaggagccaggacactgtgtggcccaatctgaggtggtcaaggaaggttgctccatctacaaccgctcagaggcatgtccagctgctcaccaccaccccacctatgaaccgaagacagtcacaacagggagccccccagtccctgaggcccacagccctggatttgacggggccagctttatcggaggtgtcgtgctggtgttgagcctacaggcggtggctttctttgtgctgcacttcctcaaggccaaggacagcacctaccagacgctaatctgacccctttgggcctggactccatcctgaggggaaaggaggatgcagagggtggcctctgggcacccttgtgggtaagcggggggcgggggcgggaaaaactctggccgccagtttttggctcctgcgggcaccaagcaggccaagtgtttaatgcctgacatctcctcctgtcctgggcctggaacctgcagctgagaaaatccctcaaccacctcgtctcctccatcgcccctgctgggccccccagcctgacagtgggttg

SEQ ID NO: 27 - DNA, 601 bp, Homo sapiens
gctgccaggaattccggcacggggaacagtgtaatattgaagcaaatgctgtataacaaccacctggaagcccctcatgtatctctttttgaaaacactcctctctttctccactctaatgatgaccaccgccttgtcttttatggtaatcactgttctttgggttttattactgcatttattggctaatatatgcatccctagaaaatgtagttttgcctgcttttatataaatggaatattactgcatgcagtcttttgatttgtgattgttttgctctaaggcttgtaagggtcatccatgttttgcatatagtttgtttattgtcattgccatagagtaaatcattgtatgaatatactgcagtttatttactgttgacatatgtttcagttgtttttaactactaggaaatgctactctgtacattcttgtatatgtaccttggtgcacatatgtatgtttttctagagtatatacagtggcatgggattgctgaattaaaaggtttgtatatcttatactagaagataataaaaacttttcctgatggattctgccaattcaaaaaaaaaaaaaaaaaaaaaaaaaaaaactcga

SEQ ID NO: 28 - DNA, 1276 bp, Homo sapiens
gtgagtgtgtggcactggtggcctggagccaaatttagcttgggtgagagttgacaatggtagttttccttcctcaagcccctctgtgcccctagagcaccctggctgtggctgcctccttcatccaagagcagagtccatgttgggccaggagacttcagatccatgtcctggtgctgcctctggctttgtctttcctcagtgggcaggactgggtctgctggtccatctttacccttctctgagctatgcagccttggcctgctgcgtctccggcctgtattctctccccttcactcaggccctgggaaaccagcccagtttctkgcaggagaggcagaggaggtcaatgcctttgctctgggcttcctgagcaccagcagtggtgtctctggagaagatgaagtagagcccttacacgatggagttgaagaggcagagaaaaagatggaagaagaaggtgtgagtgtgagtgaaatggaggcaacaggagcacaaggacccagcagggtagaagaggctgagggacacacagaggtgacagaagcagagggatcccaggggactgctgaggctgacgggccaggagcatcttcaggggatgaggatgcctctggcagggcagcaagtccagagtcggcctccagcacccctgagtctctccaggccaggcgacatcatcagtttcttgagccagccccagcgcctggtgctgcagtcttatcttcagagcctgcagagcctctgttggtcaggcatccccctaggccccggaccaccggccccaggccccggcaagatccccacaaggctggactgagccactatgtgaaactctttagcttctatgccaagatgcccatggagaggaaggctcttgagatggtggagaagtgcctagataaatatttccagcatctttgtgatgatctggaggtatttgctgctcatgctggccgcaagactgtgaagccagaggacctggagctgctgatgcggcggcagggcctggtcactgaccaagtctcactgcacgtgctagtggagcggcacctgcccctggagtaccggcagctgctcatcccctgtgcatacagtggcaactctgtcttccctgcccagtagtggccaggcttcaacactttccctgtcccacctggggactcttgcccccacatatttctccaggtctcctccccacccccccagcatcaataaagtgtcataaacagaaaaaaaaaaaaaaaaaaaaaaaaaaaaattgggggggggcccc

SEQ ID NO: 29 - DNA, 2084 bp, Homo sapiens
  misc_feature (2075)..(2075): n equals a,t,g, or c
  misc_feature (2083)..(2083): n equals a,t,g, or c
ggcacgaggagttgtgcagatacctggctgagagctggctcaccttccagattcacctgcaggagctgctgcagtacaagaggcagaatccagctcagttctgcgttcgagtctgctctggctgtgctgtgttggctgtgttgggacactatgttccagggattatgatttcctacattgtcttgttgagtatcctgctgtggcccctggtggtttatcatgagctgatccagaggatgtacactcgcctggagcccctgctcatgcagctggactacagcatgaaggcagaagccaatgccctgcatcacaaacacgacaagaggaagcgtcaggggaagaatgcacccccaggaggtgatgagccactggcagagacagagagtgaaagcgaggcagagctggctggcttctccccagtggtggatgtgaagaaaacagcattggccttggccattacagactcagagctgtcagatgaggaggcttctatcttggagagtggtggcttctccgtatcccgggccacaactccgcagctgactgatgtctccgaggatttggaccagcagagcctgccaagtgaaccagaggagaccctaagccgggacctaggggagggagaggagggagagctggcccctcccgaagacctactaggccgtcctcaagctctgtcaaggcaagccctggactcggaggaagaggaagaggatgtggcagctaaggaaaccttgttgcggctctcatcccccctccactttgtgaacacgcacttcaatggggcagggtccccccaagatggagtgaaatgctcccctggaggaccagtggagacactgagccccgagacagtgagtggtggcctcactgctctgcccggcaccctgtcacctccactttgccttgttggaagtgacccagccccctccccttccattctcccacctgttccccaggactcaccccagcccctgcctgcccctgaggaagaagaggcactcaccactgaggactttgagttgctggatcagggggagctggagcagctgaatgcagagctgggcttggagccagagacaccgccaaaaccccctgatgctccacccctggggcccgacatccattctctggtacagtcagaccaagaagctcaggccgtggcagagccatgagccagccgttgaggaaggagctgcaggcacagtagggcttcttggctaggagtgttgctgtttcctcctttgcctaccactctggggtggggcagtgtgtggggaagctggctgtcggatggtagctattccaccctctgcctgcctgcctgcctgctgtcctgggcatggtgcagtacctgtgcctaggattggttttaaatttgtaaataattttccatttgggttagtggatgtgaacagggctagggaagtccttcccacagcctgcgcttgcctccctgcctcatctctattctcattccactatgccccaagccctggtggtctggccctttctttttcctcctatcctcagggacctgtgctgctctgccctcatgtcccacttggttgtttagttgaggcactttataatttttctcttgtcttgtgttcctttctgctttatttccctgctgtgtcctgtccttagcagctcaaccccatcctttgccagctcctcctatcccgtgggcactggccaagctttagggaggctcctggtctgggaagtaaagagtaaacctggggcagtgggtcaggccagtagttacactcttaggtcactgtagtctgtgtaaccttcactgcatccttgccccattcagcccggcctttcatgatgcaggagagcagggatcccgcagtacatggcgccagcactggagttggtgagcatgtgctctctcttgagattaggagcttccttactgctcctctgggtgatccaagtgtagtgggaccccctactagggtyaggaagtggacactaacatctgtgcaggtgttgacttgaaaaataaagtgttgattggctagaaaaaaaaaaaaaaaaaaaaaaaaactcgagggggggcnccggtacnc

SEQ ID NO: 30 - DNA, 1765 bp, Homo sapiens
ggcacgagatttctgggagtcctgcagagtctagttgccaagtggaacattcttaaaaagatcgttcagaagtttaccagaattaaaagatgctgtcttggaccagtattcaatgtggggaaataaatttggagtattgctttttctgtattctgtattactgacaaagggcattgaaaacataaaaaacgaaattgaagatgcaagtgaacccttgatagatcctgtatatggacatggcagccaaagtttaattaatctcctgctgacgggacatgctgtttctaatgtatgggatggtgatagagagtgctcaggaatgaaacttcttggtatacatgaacaagcagcagtaggatttttaacactaatggaagctttaagatactgtaaggttggttcttacttgaaatctccaaaattccctatttggattgttggcagtgagactcacctcaccgtattttttgccaaggatatggctttagttgcccctgaagctccttcagaacaagccagaagagtttttcaaacctacgacccagaagataatggattcatacccgattcacttctggaagatgtgatgaaagcattggaccttgtttcagatcctgaatatataaatctcatgaagaataaattagatccagaaggattaggaatcatattattgggcccatttcttcaagaattttttcctgatcagggctccagtggtccagaatcttttactgtctaccactacaatggattgaagcagtcaaattataatgaaaaggtcatgtacgtagaagggactgcagttgtgatgggttttgaagatcccatgctacagacagatgacactcctattaaacgctgtctgcaaaccaaatggccatacattgagttactctggaccacagatcgctctccttcactaaattaatttgtctaagtatttataaggaagatcttaataacagatgttgaaagaaggagtcaagactggcaattggctggattaagctaaacactggtatcactgattaactgtaaataacaattaaaaacacattttcagtgtttatgatatgtttaaattatttgtcctaaagctttatgttaaagattatcctattttaccccttcgtgtgaaatttactagcaaaattaagctttcatcaaagttcatcacttttgcattcagatacttggtcatttacttaccaaattacaaacgcaatactacagcatttgtatattaagtatcacagttactattgataaactacttttgggttttatttcattgaggcactttttttattgtttgaatgattccggcttgtaatatatcagcctctacaatgaaatgcagaagagttcatttttctaagatctgtttttcattagaaatattgacaaataacacattgtcaacctggatcctttgacaatttacttaactctggcatgttcacaaaaagtagaaactctaagagaccattaccatttattcacagatgtataggggatgtattctaaaaactgacagaaaagagaatctgatagtcaacactgttaacttttactgtgtaattgccaaatacacttttccaaatttgtcccaacagccctgtaagccagctttcttctatatttataaacacgataaatgcatgagaagatctgttattacattagtatattacgttatttattatgatcctagttgatggcctaaataaacacctttttctttaaaaaaaaaaaaaaaaaa

SEQ ID NO: 31 - DNA, 2494 bp, Homo sapiens
ggcacgaggagatgtttaaggattacccgccagccataaaaccatcctacgatgtgctgctgctgctgctgctgctagtgctcctgctgcaggccggcctcaacacgggcaccgccatccagtgcgtgcgcttcaaggtcagtgcaaggctgcagggtgcatcctgggacacccagaacggcccgcaggagcgcctggctggggaggtggccaggagccccctgaaggagttcgacaaggagaaagcctggagagccgtcgtggtgcaaatggcccagtgacccccagacgcggaaaccgggtggcagcgcccagcctggccccaagcatggaaacgcacaacccctaatcgccctgagctactgcttctaacacctcttttcccttgtgtgagggcaaaccaggctgcaggtggggttttcacttcctagggtagtttaattttaaaataggccaatgttggctagtctgtgcctcagtgagatcagtcagctccgagtggctcccgtgtcgtaacagcaggagcatggccgcaacttcccaggccgaggaagggcccccggctcggcctcttgagagccccacccctgaactggccccagctcctcttcctgcctctctcatggcttgggctggagtgggctctctggacctgaccagactgtgggtccctgcgtctcctgcccactctgaccgggcttcctccctccacgcttagggtctgtcccgggtactcagtcagcccagtgggatcttacccacttccctgcaaggtgcacctgccccaggctcaggctgcccagcggctcttcctggacagtgagagcagggctgggcgcctctgtcctggcccgggagccgcaggggcccctcctccagagcctgggcgcaagcgacacaggctgccgctgctctcccaggtgaaatccacaccagtccacgccgggtcgcctgccctgtctccctacttagacccagtcattctagagggatccaccgccacactggccggcccacgtcctgggtgctgtcatgcccagcttggagtgccacgtggccgctgcccacgtcccgggcactgtcatgcccagcttggagtgccacatggccgctgcccacgtcccgggcactgtcacgcccagcttggagtgccacgtggccgctgctgtgacaggcagtgttcttgggggtggggctgcatccaaggctttgtaaaccggctggaccacgtctccctggccccagtgaccgggggaagctgagcccctccctcctgtgtttgctcccattactcaaaatgcaggacagatcaggtcagagcccaggaattctcacaggttcacccagcgccctctacctcctagcaagtactttgtcttgatcctcactgagaaggccccagggcagcggtcttctccatctccgctgttttggggtcttagggtacagcccaggcggtcactgcccacctgccaggctgcagggacagttgggtgtgagaataacactggctttgggtagtgccatggccaggagtgggtttccctgcgtctcctcgtcccgagggcgcctgggtcctcccagctgacggcagtaaatccacagtgagttggggcgactgtgaaactggaatgctgttactttgataattactttccagcaggtgttttccttcacaatggttttgtttctttccttctgatctgagaagacatgaacgttttctcttcaccgccgtggggtgtattgactggtcccccatgggctgctggaaaggcccggagatgcatctgtggcctggggccatcaagatcaaagaaccaggaggcctgggagatgcagctggatggggcggcctgcagaccctgccagggggtttgaggaccctcccaggtttcccactgcggaacaggagtgactctggctgccaagataccttcatggtgttcatgacaagtggaatcattattttcaaccattgaagggggatgcaggcaagacaccttcccagctgctcctagaggggacaagccaggccctctctgcagtcctcggcagctccggaaggacacagtcaggggccgggcaaacactttggccacagccccaaacaagcgccaccgtgggagaggagaggctgctgtcactggtaccggatgcagaccccaccctgtctgcaggccacccccacctccctgcagctttgaggctggcggggtctgctcctgggaatggggtgggagccacagggacgacccggggcgggctgatgtcttcttgggggcagaccagagagctcaagtttcagagtcagaattaggcacttggagcgtttttgctggcttgcactttcttattttcttattttagagcgcttaaaaaaatccggaaaaatggggtttaaaagaactgtctctttcagtctacatttttgtttaatacgcttgagcaataaacgcttacttgcaaaaaaaaaaaaaaaaaaaaaaaaaaa

SEQ ID NO: 32 - DNA, 885 bp, Homo sapiens
  misc_feature (233)..(233): n equals a,t,g, or c
aattcggcacgagagggctgcatccttgcgttctgtgagctctgcccgttgggagcatccatgctgatgtgcaggggccgtgcagcactgcattcttcttgccttctctgttctgtttagtacaaccaccccagcaggtctccagttcctgccaggttagtgtggatggcccagcaccatctcctctccatcttgttggctatcctctcttgttcctcacaaccccgccaggntcgcggctcaggagctctgccgtgtgaagtgtgctcagcagttctcctcacatgtctacgcaaaatctctggctccctgtgtgtctgagcccaacagacacactgagcacaggagttggctctcagctcctcccagcttgccgtgactgagccytgccgtcctgtggcamcgccasggagaccacagtgtccaactgtccaacctttacgtaattggcatcccaggaggagaagcaagagtgaatggggcaggaaaagatcattaaagaaatcgtggctgacataaaaaaggatgagttcatgtcctttgtagggacgcgtggatgaagctggaaaccatcattctgagcaaactatcgcaaggacagaaaaccaaacaccatgtgttctcactcataggtgggaattgaacaatgagatcacttggacacagggtggggaacatcacacaccggggcctgtcgtggggtgagggggatggggcagggatagcattaggagatatacctaatgtaaatgacgagttaatgggtgtcagcacaccaacatggcacatgtatacatatgtaacaaacctgcatgttgtgcacatgtaccccagaacttaaagtataataaattaaaattaaaaaaaaaaaaaaaaaactcgtag

SEQ ID NO: 33 - DNA, 790 bp, Homo sapiens
  misc_feature (37)..(37): n equals a,t,g, or c
  misc_feature (55)..(55): n equals a,t,g, or c
  misc_feature (76)..(76): n equals a,t,g, or c
  misc_feature (112)..(112): n equals a,t,g, or c
  misc_feature (120)..(120): n equals a,t,g, or c
  misc_feature (137)..(137): n equals a,t,g, or c
tcaactgggtgaaaaggaaaacccacccttggcgccnaatacgcaaaccgccttntccccggcgcgttggccgatncattaatgcagctggcacgacagttttcccgactgnaaagcggncagtgagcgcaacgcanttaaatgtgagttagctcactcattagcaccccaggctttacactttatgcttccggctcgtatgttgtgtggaattgtgagcggataacaatttcacacaggaaacagctatgaccatgattacgccaagctctaatacgactcactatagggaaagctggtacgcctgcaggtaccggtccggaattcccgggtcgacccacgcgtccggttgaatgcactgagtcccttggtgtagtagcaataaggaaaaatgaaattactttcctgtgcacacagtccagcctaattggtatgtgatgttgcacttagcagccatgtggtgggcatgtgtgactactctggttttcactttagtttctaaactttttatccctctcaagtccagcatggatggggaaatgtctctggatccccacagctgtgtacttgtttgcatttgtttccctttgagatttgtgtttgtgtcctgctttgagctgtaccttgtccagtccattgtgaaattatcccagcagctgtaatgtacagttccttctgaagcaagcaacatcagcagcagcagcagcagcagcacaattctgtgttttataaagacaacagtggcttctawwaaaaaaaaaaaaaaaaaaaaaaaaaaaaaaaaaaaaaa

SEQ ID NO: 34 - DNA, 1343 bp, Homo sapiens
ggcacgaggtcaaggcaaaaatgggtcaggtttggagagttcccccactccttttgagtgttcaggttttccttaccatggctcatgctttccatcaagcaccagagttgcagtggcttggcctctggttctgggtgaggttatttgcaggtggagacggggggctgcacctgaacatttctagtgtcaccctccctctccttcatgggaaacagctctccagggaagtaccttcctgccaggggaagccaaggctgggccggccgccctacaaggagccacaggattgcagccatgggtgccacctttcatggaaggggagatttatgggctttcctggaacccccaggctgtcctggccaagaggaaagaggtggttacttcaggagtttgaccttagttagataactaaaagaatacatttcccctcccttttctttatttcctcaataaaaatgtacaaagtatcacccttctccatgccccaatctgtgttaaagtcacaatctatgggtgtagttctgggattctgtcaaattctccttcctgctctccaaaatggacaattgtcgtagggaccacatgcccccagaatacaatggcctctgtgttctactggggtcaagcctgctagaactcagcattcatgacaggggctaagtgtgcatgaagtgacactgactacagctagaaagccaggcgcacaaatgccccttccccccagggccgctctttccagcgcagtcatccagaaaggcccacgtgcagagcccctgtgtctcagatgctgcttcagttgcccgtcctgtcctcagaggccactgtgctggccctctatcatttgacctgactttagaacctgacctcaaggatatggcagcgctagcctttagctcccacagcacggatgggggtgatgccagttagaagtgggtagtgaacgtttgctgagctgttcactgtttctctcttctctttggaagcacctctccgagccatgtgagccccctgatgccaccgagcaggggcagcttcatgaccgatgtctggctgaggctgtggcggacactctcggggttgtctgcaggagagcaagccaggaggacatgggcctggacgacacggcctcgcagcaaagtgtgtcagacgagcagtgacgggcgtgcggccgggcggggaggctggctcccccacacctcccacctgcattgctctccctcgtgctccccaaatcaccacaaccaaccaataccgcaatccatgagggactcctcctgtggaaaaggagagctgttccagaacacagaactgatctcaggtttttgaaaaaaaaaaaaaaaaaa

SEQ ID NO: 35 - DNA, 1089 bp, Homo sapiens
  misc_feature (353)..(353): n equals a,t,g, or c
  misc_feature (528)..(528): n equals a,t,g, or c
cggcacgagaaacgcggtgcttgctcctcccggagtggccttggcagggtgttggagccctcggtctgccccgtccggtctctggggccaaggctgggtttccctcatgtatggcaagagctctactcgtgcggtgcttcttctccttggcatacagctcacagctctttggcctatagcagctgtggaaatttatacctcccgggtgctggaggctgttaatgggacagatgctcggttaaaatgcactttctccagctttgcccctgtgggtgatgctctaacagtgacctggaattttcgtcctctagacgggggacctgagcagtttgtattctactaccacatagatnccttccaacccatgagtgggcggtttaaagaccgggtgtcttgggatgggaatcctgagcggtacgatgcctccatccttctctggaaactgcagttcgacgacaatgggacatacacctgccaggtgaagaacccacctgatgttgatggggtgataggggacatccggctcancgtcgtgcacactgtacgcttctctgagatccacttcctggctctggccattggctctgcctgtgcactgatgatcataatagtaattgtagtggtcctcttccagcattaccggaaaaagcgatgggccgaaagagctcataaagtggtggagataaaatcaaaagaagaggaaaggctcaaccaagagaaaaaggtctctgtttatttagaagacacagactaacaattttagatggtaaggttcacaaataggttgatttctttcttcagctttctgacatgtccagcccatctctaatgaggactcccagatcatcactttatggctgttaggtgtttcccatatgaaattagaggagctgggtcagggagacaaaagtcttctattagtcttatggatagctcctccttgagtgtattttgtgcaaaagattaagaagctggactctactgccattaaagctgagagaatcctaaggttaaaaaaaaaaaaaaaaaaaaaaaaaaaaaaaaaaaaaaaaaaaaaaaaaaaaaaaaaaaaaaaaaaaaaaaaaaaaa

SEQ ID NO: 36 - DNA, 875 bp, Homo sapiens
  misc_feature (66)..(66): n equals a,t,g, or c
  misc_feature (872)..(872): n equals a,t,g, or c
ggcacagcgcgaggctgggtcccggcccaggagaaggaagtcgctgaaggcagtggccatgctggncgtggaaatgggaggcggttgcagrgggtctatggggcccggtcctggatactcggcaggaagccgtgtctgcagaggctcctccctgcctcaggtggccccgttcaaccccagccgtgcccatctcctgccaccgcctgtcggtgggggtttaaattcggtgtggctttctggggtgcagctcagcacccccccttatgcagactgggagggggtcgggcagtcccctcagccacgaggaccctggatgggttctagttcacttgggaccgtggggcctggctgcgtactgagtgggtgccccacagtcaaggccaacgggggctccccctgctctgagatgttgggagaaaggcggcttctggaaccttccgtgggacccgtaagtggctgtccagaaaggcgggagggtgggcacggggcacggggggcagctggggtcgtcgttaagggtcacgcatccgtacagttgaatttcctttctcttatcatgttttacccaccttgtcccttttttccccaattgtgcttttgcatttttttccttggcaaatgtaaactcagcctttcattcatgacgtgtgaaatttcagtttctctggagtttgtcagacggcgtgggaaccacgcctgaaactcaggtaataggaggaaaaaaaaaaaacttaaaaaaatttttaaaaaacataaaactactctctacctctgctggsccagcctgtctcgccctggccgcggcagggtggcctgtaacaatttcagttttcgcagaacattcaggtattaaaaggaaaaaaaaaaaaaanggg

SEQ ID NO: 37 - DNA, 320 bp, Homo sapiens
agggcgcacggccaattgatgggcatgatccttgtgctggcgagcttcctggcgcacccggtcgaggcgctcgcgcaagctgtcgcgctgggccagcagcaactcgcgctgctcggtgtscarrgccatgctgtcgagggcttcctgcaattgcagrcgtgcttcgccgrcttgttcgtgttcgarggcgcgttgctcgcccatctcggccacttcttcgtcgagccgggtgcggcgcagggtcagttgctcgaccttggccttgytcgccgagagctgggctttcaattcgccctgctggcgcgcttcgtcctgcaaca

SEQ ID NO: 38 - DNA, 710 bp, Homo sapiens
ggcacgagctgggcctccaggttcttcacctgtcacatgatcattttacatattgtggtctgtttatttaccatcagcatcatagaagagcaaaaagaagaaatactgtgctccactaaaagccaggctgagaaaacagttactcacattgagcagtgagtgaccactaggtgggcatttgttcatagctgcatggagaacaagtgcccatatacatctttctgctgatgcagcctctaaattttgaatgcatcagttttttaaactgcattgagcaatattccgtgggtgtgatccataatagcgtaactatttacgcctgtgacagagaggaaaactgtatggatatcagatatctttaagagctttttaatctttaatcaagttagtacttcttaaggatgattaaggccaggcagtggctcacacctgtaatcccagcattttgggaggccaagatgggtggatcccttaaggtcaagagttcaaggccatcctggccaacatggtgaaaccccatctctactaaaaatacaaaaattagctggggtgtggtggcaggcgcctgtaaccccagctactcaagaggctgagacaagagaatcgcttgaagccaggagttggagattgcagtgagccaagatcatgccacttcactccagcctggacagcagagtgggacttcttcttaaaaaaaaaaaaaaaaaaaa

SEQ ID NO: 39 - DNA, 1421 bp, Homo sapiens
ggcagagggagcggagagcgtgctaaccaatgacttgagggagtagggggccgggtttgggccctcagttgctaagggctacccgagtgggaagcggttcaagagatggggtgaagggtggttcaccggttcttcaagtcctcagccttctggcccgmggaagttaagcaaccaagaggcgggcctaagaccggaagcaggaaggagggcgcaggaagcagggcgccgcagcctgtcgtacggtccttctgtgggtctgtcggtgccgagggcaggatggagaagctgcggctcctgggcctccgctaccaggagtacgtgactcgtcacccggccgccacggcccagctggagacagcagtgcggggcttcagttacctgctggcaggtcgattcgccgattcgcacgagctgtcagagctggtgtactctgcctctaacctgcttgtgctgctcaatgacgggatcctacggaaggagcttcggaaaaagttgcctgtgtcgctgtcccagcagaagctgctgacatggctgagcgtgctggagtgcgtggaggtgttcatggagatgggagctgccaaggtgtggggtgaagtgggccgctggcttgtcatcgccctcatccagctggccaaggctgtactgcggatgctcctgctgctctggttcaaggctggcctccagacttcaccccctatcgttccactggacagagagaccaggcacagcccccggatggtgaccacagccywggyaaccatgagcagtcctacgtggggaagcggtcaaaccgggtggtgcgaaccctccagaacacgccgtccctgcactccaggcactggggagctccccagcagcgggagggacggcagcagcagcatcacgaggagctgagtgcgacccccacccccctggggcttgcaggagaccatcgcagagtttttgtacattgcccggccgctgctgcacttgctcagcctgggcctktggggtcarargtcgtggaaaccctggctcttggctggtgttgtggacgtgaccagcctgagcctcctgagtgacagaaagggcctgacccggarggagcggcgggagctgcggcgccggamcatcctgctgctctactacctgctgcgctctcctttctacgaccgcttctccgaggccaggatcctcttcctgctccagttgctggccgaccacgtccctggcgttggcctggtcacaaggccgctcatggattacttgcccacctggcagaaaatctacttctacagttggggctgacagactcccggaaggagggtgtggggaggggtgggcagggagcccctcttccctaataaaactgactccggcagcaaaaaaaaaaaaaaaaaaaaaaaaaaaaaaaaaaaaaaaaaaaaaaaaaaagggcggcc

SEQ ID NO: 40 - DNA, 3447 bp, Homo sapiens
accaattcccttcctgggagttgcggcttccctcgctcggccccactcccgtttaccctttccccagctcccgccttagccaggggcttccccgcctgccgctagggctcgggccgaagcgccgctcagcgccagcctgccgctccccgggctccactttcactttcggtcctgggggaactaagccggaggcagtggtggtggcggcggcgcaagggtgagggcggccccagaaccccaggtaggtagagcaagaagatggtgtttctgcccctcaaatggtcccttgcaaccatgtcatttctactttcctcactgttggctctcttaactgtgtccactccttcatggtgtcagagcactgaagcatctccaaaacgtagtgatgggacaccatttccttggaataaaatacgacttcctgagtacgtcatcccagttcattatgatctcttgatccatgcaaaccttaccacgctgaccttctggggaaccacgaaagtagaaatcacagccagtcagcccaccagcaccatcatcctgcatagtcaccacctgcagatatctagggccaccctcaggaagggagctggagagaggctatcggaagaacccctgcaggtcctggaacacccccctcaggagcaaattgcactgctggctcccgagcccctccttgtcgggctcccgtacacagttgtcattcactatgctggcaatctttcggagactttccacggattttacaaaagcacctacagaaccaaggaaggggaactgaggatactagcatcaacacaatttgaacccactgcagctagaatggcctttccctgctttgatgaacctgccttcaaagcaagtttctcaatcaaaattagaagagagccaaggcacctagccatctccaatatgccattggtgaaatctgtgactgttgctgaaggactcatagaagaccattttgatgtcactgtgaagatgagcacctatctggtggccttcatcatttcagattttgagtctgtcagcaagataaccaagagtggagtcaaggtttctgtttatgctgtgccagacaagatgaatcaagcagattatgcactggatgctgcggtgactcttctagaattttatgaggattatttcagcataccgtatcccctacccaaacaagatcttgctgctattcccgactttcagtctggtgctatggaaaactggggactgacaacatatagagaatctgctctgttgtttgatgcagaaaagtcttctgcatcaagtaagcttggcatcacaatgactgtggcccatgaactggcccaccagtggtttgggaacctggtcactatggaatggtggaatgatctttggctaaatgaaggatttgccaaatttatggagtttgtgtctgtcagtgtgacccatcctgaactgaaagttggagattatttctttggcaaatgttttgacgcaatggaggtagatgctttaaattcctcacaccctgtgtctacacctgtggaaaatcctgctcagatccgggagatgtttgatgatgtttcttatgataagggagcttgtattctgaatatgctaagggagtatcttagcgctgacgcatttaaaagtggtattgtacagtatctccagaagcatagctataaaaatacaaaaaacgaggacctgtgggatagtatggcaagtatttgccctacagatggtgtaaaagggatggatggcttttgctctagaagtcaacattcatcttcatcctcacattggcatcaggaaggggtggatgtgaaaaccatgatgaacacttggacactgcagaggggttttcccctaataaccatcacagtgagggggaggaatgtacacatgaagcaagagcactacatgaagggctctgacggcgccccggacactgggtacctgtggcatgttccattgacattcatcaccagcaaatccgacatggtccatcgatttttgctaaaaacaaaaacagatgtgctcatcctcccagaagaggtggaatggatcaaatttaatgtgggcatgaatggctattacattgtgcattacgaggatgatggatgggactctttgactggccttttaaaaggaacacacacagcagtcagcagtaatgatcgggcaagtctcattaacaatgcatttcagctcgtcagcattgggaagctgtccattgaaaaggccttggatttatccctgtacttgaaacatgaaactgaaattatgcccgtgtttcaaggtttgaatgagctgattcctatgtataagttaatggagaaaagagatatgaatgaagtggaaactcaattcaaggccttcctcatcaggctgctaagggacctcattgataagcagacatggacagacgagggctcagtctcagagcgaatgctgcggagtgaactactactcctcgcctgtgtgcacaactatcagccgtgcgtacagagggcagaaggctatttcagaaagtggaaggaatccaatggaaacttgagcctgcctgtcgacgtgaccttggcagtgtttgctgtgggggcccagagcacagaaggctgggattttctttatagtaaatatcagttttctttgtccagtactgagaaaagccaaattgaatttgccctctgcagaacccaaaataaggaaaagcttcaatggctactagatgaaagctttaagggagataaaataaaaactcaggagtttccacaaattcttacactcattggcaggaacccagtaggatacccactggcctggcaatttctgaggaaaaactggaacaaacttgtacaaaagtttgaacttggctcatcttccatagcccacatggtaatgggtacaacaaatcaattctccacaagaacacggcttgaagaggtaaaaggattcttcagctctttgaaagaaaatggttctcagctccgttgtgtccaacagacaattgaaaccattgaagaaaacatcggttggatggataagaattttgataaaatcagagtgtggctgcaaagtgaaaagcttgaacgtatgtaaaaattcctcccttgccaggttcctgttatctctaatcaccaacattttgttgagtgtattttcaaactagagatggctgttttggctccaactggagatacttttttcccttcaactcattttttgactatccctgtgaaaagaatagctgttagtttttcatgaatgggctatcgctaccatgtgttttgttcatcacaggtgttgccctgcaacgtaaacccaagtgttgggttccctgccacagaagaataaagtaccttattcttctcattttatagtttatgcttaagcacccgtgtccaaaaccctgtaccccatgtttatcattcataaactgtttcatcagtctcaaaaaaaaaa

SEQ ID NO: 41 - DNA, 3037 bp, Homo sapiens
aattcggcagagcctaggaggagaaagttccatcatgtcggagatcagaggaaaacccattgagtccagctgtatgtatggcacctgctgcctctggggaaagacttattccatcggatttctgaggttctgcaaacaggccaccctgcagttctgtgtggtgaagccactcatggcggtcagcactgtggtcctccaggccttcggcaagtaccgggatggggactttgacgtcaccagtggctacctctacgtgaccatcatctacaacatctccgtcagcctggccctctacgccctcttcctcttctacttcgccacccgggagctgctcagcccctacagccccgtcctcaagttcttcatggtcaagtccgtcatctttctttccttctggcaaggcatgctcctggccatcctggagaagtgtggggccatccccaaaatccactcggcccgcgtgtcggtgggcgagggcaccgtggctgccggctaccaggacttcatcatctgtgtggagatgttctttgcagccctggccctgcggcamgccttcamctacaaggtctatgctgacaagaggctggacgcacaaggccgctgtgcccccatgaagagcatctccagcagcctcaaggagaccatgaacccgcacgacatcgtgcaggacgccatccacaacttctcacctgcctaccagcagtacacgcagcagtccaccctggagcctgggcccacctggcgtggtggcgcccacggcctctcccgctcccacagcctcagtggcgcccgcgacaacgagaagactctcctgctcagctctgatgatgaattctaggtgcgggctgcagtggcggaagtgctggcgccatagccacggtcaggctgtgccccacctccagcctcaccaccaggccaggaggcagctggcacagtgctcacgccgcctttatttattggaccagaaacactcacatgtcgcttccagaggaacgggggacagccaggctcgcccatgggccttcaggaatatttatacatggcccagcctgcactgcccgggcgagggcagaggacactgggagcaaggcttatgcccctgctgcccgtcctgtgctgggggcatgctgggaccagccgcacccaggccccaatgcttgtgtgtggaccagcggctgcagccttctagcccctcctccccgcgagactctcaggctgaggtcggcaagccgtggctcccccacacaccgtgcaataccctgtctgacctgggctcttcccgcctgcatccctyccctgtccacctttgtccagtgctagattcacctcaccccgggcaggagtggggatgtgggcgctctgtggtcctcccctcctgacccaggcctctgtggcatgctgcaaggatcagagccagacaccaggagtcacaggccccacccaggaagggcattcagggcccctgggcaccgcttctgttgaagcaggggcttctgggcccctgggtatccccacctgtcgtggccacacctctgcctgcctcatgccccttccccctggcctaccaaggacagcccacagcccgcactgccggctcacttgggtccttcctcgatagctttgggcagagcccttgcttcctggctgcttcagggctcaggggctcccagccctccttcccaggctgatgctgggtcctctctctctttggggcttctccctcccgtttcaggggaaaggtctgagtctccacgtttcagaccagcttctgggggaaggcagtccggcagggagaccgggaggggtggccacacagtggggagctgggaggtggggggaatggtcccagactcctctcggggcccctatccacacagggcctggtgttctaccccatctggcccctggcccatctcttctgtgccttagtcacatatgaaagcgcccctccctggctccccatctgtcccacacgctccctggggctcttagttcagctgctggcactcgcaggatcctgcagtgctgggcccagagcccttggacaggcctcaggagtggtcaggaccaccaagcccctcctctccccctccacacctctagacctggggcctccggaacccccagcaggctgggcttatactagctcctgacttaggaagagcctcgtgtcacaacacgtgtccctacaggcaaagtgtcctggcatttaaaacccagattatccctgggtttgggctgcagtcacctggagaagctggtagggtaagggagagggaccctgccggtgttcactggggattctttcttttggtccttcctggaatgaacaggttccctccctgccacctgtgaggagagttggggcccagccgtcttcctggcctccttcctttcctcgtggcagaggcctgcatgtgggtgccagaggccagctctccccctccatcttgggggggcggagcagttgggcccaagctgcccgggagggtgggtgcagacacaggctgaggaccagccctggccctgccccgccatctgctttcaccaagctgtctctccaccgtggcttcccttctccctccaggccaaagtgctgctgattcccactcccttggttttcgcctgcccagcgttgctgtttgcgtggagggtggggggagctcagtggcagggaatcagcggtccgtggggtcgtggggacgggaacatgtgcccgaccgctccatcccctcctcctccttaggatgcataacctaccttgtctttttttttttaaattttctttccaggtagagtagctctttgtacataaagaatacttgaaaaattaattgtatgatgtatgagaagacagagtctcctagttttgtatcttgttgtatgactgccatgagttccaccagaaagccactctattttggtctctgtgacattttaaatgcgtgacagaagtgagcaaataaagtgaggaagaaatctaaaaaaaaaaaaaaaaaaaaaaaaaaaaaaaaaaaaaaaaaaaaagggcggccgc

SEQ ID NO: 42 - DNA, 767 bp, Homo sapiens
catgaaaacacattctcttatagtttttaaattcatcatccaagagttcctgctctttgatgatgagacatacctggtagactccaaaacagagagcagacgcctagtatctttgttctggggtgtgcattaagagtacattgacctgtctgtctccagtcttgactcttttggaagagagatgctagtactgatgacaacctgcattctggctgcggtgtgygtccacactgcacagtgtgcaccagactctcgtatggacaatgactgtccctcacatcaggcgcagatccattttagagcctcagaagtcaggagagggtggactttcaaccacgactgaaaacactgtctttcttaggacatgctgtgtgtatgacacacttacagatgtctgtgctcactgatgcttgttgatgtgtcatcgcacatcagtgacaaacatttgtcatgtttttgcctttggtggaacttctttattatactcactttcctcccaaaccatttttctcaacttcatcatgaagcaaatgtcatgtggtcattctgtgatggggctcagggctaggttaggtgatgatttctgaaagctcagagacgtgaaggaaaaaggacatcagtgcttggatcttagctcttataagcctcacgtgcaacaataaacccgagttcaagaatcagattcttagatagattggtttggtagcaaatgacaaaaaaccaacgtaaatatgcttcggcaaaaaaaaaaaaaaaaaagggcggcc

SEQ ID NO: 43 - DNA, 1057 bp, Homo sapiens
tcgacccacgcgtccgctgagattacaggtgtgagccaccaggctcagccccctaagatttgaaacactttaaatggcccatggtagggttcctgctaggataaaacattaagcggctgttaaaagaaataaaaggaggacacgtctctgtgcactggtgtggacaaatctccaagtcactgcaaaatggaaaaagtataagatgctctttccctgaacctcaagggtcccgcccctctcactttcaggtctctggacctctgactgacactgtgcctgcccaggtccctgtatgcactgccacagtgccctgggccccatgtccacccctgtcctgcccttctctgggatagggctggccttcctctgcctctgcctggctgcatccatggtcgatctcaagtgccttggcatgaactccactctcctgcagccttcaatcaaggaatgatggggatgtgtacataccccaccccaccccttggcagggtgatgctgaggtgtggatttttaacagttcccagactttcccaggaggcttgggtttgggtgcccacagtgggagctggtgtgatatcataccttcgccggccgcctttccttcctgttctctgtgcccctactcccactctagagctgccccgtttctctgttttcgtgaaagagctgaccctgtgctgcctcccactctcccaatgcccctgccactcctgtgagcctgctgctggtgaggtcggtgctgacctctgtgttgctggataatgagtcatctatctctggaggagaagaaaggcaggtcctccacagccctgataaaatctccaagtctcccagtttcgggtccctctcctgggatgcagacccactgcctgcccagctggtacgatccacatgccctcttcttgggaataggggcatgggaaagtgactaaagatactgttctggctgctgtgttcactgtgagtaataaactgtccatttctccgaaaaaaaaaaaaaaaaaaaaaaaaaaaaaaaaaaaaaaaaaaaaaaaaaaaaaaaaaaaagggcggccgc

SEQ ID NO: 44 - DNA, 2687 bp, Homo sapiens
  misc_feature (1614)..(1614): n equals a,t,g, or c
gtacaccatgggcctccacctccgcccctaccgtgtggggctgctcccggatggcctcctgttcctcttgctgctgctaatgctgctcgcggacccagcgctcccggccggacgtcaccccccagtggtgctggtccctggtgatttgggtaaccaactggaagccaagctggacaagccgacagtggtgcactacctctgctccaagaagaccgaaagctacttcacaatctggctgaacctggaactgctgctgcctgtgcatcattgactgctggattgacaatatcaggctggtttacaacaaaacatccagggccacccagtttcctgatggtgtggatgtacgtgtccctggctttgggaagaccttctcactggagttcctggaccccagcaaaagcagcgtgggttcctatttccacaccatggtggagagccttgtgggctggggctacacacggggtgaggatgtccgaggggctccctatgactggcgccgagccccaaatgaaaacgggccctacttcctggccctccgcgagatgatcgaggagatgtaccagctgtatgggggccccgtggtgctggttgcccacagtatgggcaacatgtacacgctctactttctgcagcggcagccgcaggcctggaargacaagtatatccgggccttcgtgtcactgggtgcgccctgggggggcgtggccaagaccctgcgcgtcctggcttcaggagacaacaaccggatcccagtcatcgggcccctgaagatccgggagcagcagcggtcagctgtctccaccagctggctgctgccctacaactacacatggtcacctgagaaggtgttcgtgcagacacccacaatcaactacacactgcgggactaccgcaagttcttccaggacatcggctttgaagatggctggctcatgcggcaggacacagaagggctggtggaagccacgatgccacctggcgtgcagctgcactgcctctatggtactggcgtccccacaccagactccttctactatgagagcttccctgaccgtgaccctaaaatctgctttggtgacggcgatggtactgtgaacttgaagagtgccctgcagtgccaggcctggcagagccgccaggagcaccaagtgttgctgcaggagctgccaggcagcgagcacatcgagatgctggccaacgccaccaccctggcctatctgaaacgtgtgctccttgggccctgactcctgtgccacaggactcctgtggctcggccgtggacctgctgttggcctctggggctgtcatggcccacgcgttttgcaaagtttgtgactcaccattcaaggccccgagtcttggactgtgaagcatctgccatggggaagtgctgtttgttatcctttctctgtggcagtgaagaaggaagaaatgagagtctagactcaagggacactggatggcaagaatgctgctgatggtggaactgctgtraccttaggactggctccacagggtggactggctgggccctggtcccagtccctgcctggggccatgtgtcccccctattcctgtgggcttttcatacttgcctactgggccctggcncsgcagccttcctatgagggatgttactgggctgtggtcctgtacccagaggtcccagggatcggctcctggcccctcgggtgacccttcccacacaccagccacagataggcctgccactggtcatgggtagctagagctgctggcttccctgtggcttagctggtggccagcctgactggcttcctgggcgagcctagtagctcctgcaggcaggggcagtttgttgcgttcttcgtggttcccaggccctgggacatctcactccactcctacctcccttaccaccaggagcattcaagctctggattgggcagcagatgtgcccccagtcccgcagctgtgttccaggggccctgatttcctcggatgtgctattggccccaggactgaagctgcctcccttcaccctgggactgtggttccaaggatgagagcaggggttggagccatggccttctgggaacctatggagaaagggaatccaaggaagcagccaaggctgctcgcagcttccctgagctgcacctcttgctaaccccaccatcacactgccaccctgccctagggtctcactagtaccaagtgggtcagcacagggctgaggatggggctcctatccaccctggccagcacccagcttagtgctgggactagcccagaaacttgaatgggaccctgagagagccaggggtcccctgaggcccccctaggggctttctgtctgccccagggtgctccatggatctccctgtggcagcaggcatggagagtcagggctgccttcatggcagtaggctctaagtgggtgactggccacaggccgagaaaagggtacagcctctaggtggggttcccaaagacgccttcasgctggactgagctgctctcccacagggtttctgtgcagctggattttctctgttgcatacatgcctggcatctgtctccccttgttcctgagtggccccacatggggctctgagcaggctgtatctggattctggcaataaaagtactctggatgctgtaaaaaaaaaaaaaaaaaaaaaaaaaaaaaaaaaagggcggcc

SEQ ID NO: 45 - DNA, 728 bp, Homo sapiens
aaatgatttagtgacctatacaagtagcctgcagtaccggatccgaattcccggtcgacccacgcgtccggtgaaaacagcagagtgctactccataccactgggatcttgtccagtaaacatccagagagtgaggttaggaaataaaaagtatataaatattagatgcctagaaatgcaagtcactttaaagattttatgtgaaatagaaaaaaaagagaggagagggactcattgtcttgtaatgggtccttcccagagagaggtgactgtccagtggcaccgggcccttttcctccttccccttttactcttatcaactaggacagaaactaagaattttggcttcaagtggctaaaagactgatgggggaaaaaagaaaatagaaaaaaataacagagagactgacgctctaggcagttacaagtccaagaaaaaagacagaaacttttaagtattgagccaaaaccaggtctagcaamcataatgctggccctagattatttattaatttatgaagaaacttctagatatgggggtgacaaaaggaaattaaatccattatatatgcatatattttaatgtaaatatataatagataaattatgtatacataatatataaccaaattgaaacagttttacaatttggtttgactggaaattcaaaatccatatattaatttttgtagtaaaagtttatgtaaaaaaaaaaaaaaagggcggcc

SEQ ID NO: 46 - DNA, 1635 bp, Homo sapiens
  misc_feature (85)..(85): n equals a,t,g, or c
tcgacccacgcgtccgcagctctccgtggacaatgggctgtggcgtgtgaccctgtgcatgctggccttcccgctgctcctcacnggcctcatctccttcagggagaagaggctgcaggatgtgggcacccccgcggcccgcgcccgtgccttcttcaccgcacccgtggtggtcttccacctgaacatcctctcctacttcgccttcctctgcctgttcgcctacgtgctcatggtggacttccagcctgtgccctcctggtgcgagtgtgccatctacctctggctcttctccttggtgtgcgaggagatgcggcagctcttctatgaccctgacgagtgcgggctgatgaagaaggcagccttgtacttcagtgacttctggaataagctggacgtcggcgcaatcttgctcttcgtggcagggctgacctgcaggctcatcccggcgacgctgtaccccgggcgcgtcatcctctctctggacttcatcctgttctgcctccggctcatgcacatttttaccatcagtaagacgctggggcccaagatcatcattgtgaagcggatgatgaaggacgtcttcttcttcctcttcctgctggctgtgtgggtggtgtccttcggggtggccaagcaggccatcctcatccacaacgagcgccgggtggactggctgttccgargggccgtctaccactcctacctcaccatcttcgggcagatcccgggctacatcgacggtgtgaacttcaacccggagcactgcagccccaatggcaccgacccctacaagcctaagtgccccgagagcgacgcgacgcagcagaggccggccttccctgagtggctgacggtcctcctactctgcctctacctgctcttcaccaacatcctgctgctcaacctcctcatcgccatgttcaactacaccttccagcaggtgcaggagcacacggaccagatttggaagttccagcgccatgacctgatcgaggartaccacggccgccccgccgcgccgccccccttcatcctcctcagccacctgcagctcttcatcaagagggtggtcctgaagactccggccaagaggcacaagcagctcaagaacaagctggagaagaacgaggaggcggccctgctatcctgggagatctacctgaaggagaactacctccagaaccgacagttccagcaaaagcagcggcccgagcagaagatcgaggacatcagcaataaggttgacgccatggtggacctgctggacctggacccactgaagaggtcgggctccatggagcagaggttggcctccctggaggagcaggtggcccagacagcccgagccctgcactggatcgtgaggacgctgcgggccagcggcttcagctcggaggcggacgtccccactctggcctcccagaaggccgcggaggagccggatgctgagccgggaggcaggaagaagacggaggagccgggcgacagctaccacgtgaatgcccggcacctcctctaccccaactgccctgtcacgcgcttccccgtgcccaacgagaaggtgccctgggagacggagttcctgatctatgacccacccttttacacggcagagaggaaggacgcggccgc

SEQ ID NO: 47 - DNA, 4893 bp, Homo sapiens
ccacgcgtccgtgagaagataatcctgagaggctgcatcctgagaaataccagctggtgttttggaatggttatttttgcaggtcctgacactaaactaatgcagaatagtggtaagacaaagtttaaaaggacaagcattgatagattgatgaatactctagtactatggatttttgggtttctgatatgcttgggaattattcttgcaataggaaattcaatctgggagagtcaaactggggaccaattcagaactttcctcttttggaatgaaggagagaagagctctgtgttctccggattcttaacattctggtcatatattattattctcaatacagttgtacccatttccttatatgtgagtgtggaagtaattcgtctaggacacagttattttataaactgggaccggaagatgtattattctcgaaaagcaatacctgcagtggctcgaacgaccacgctcaatgaggaactggggcagattgagtacattttctccgacaaaacgggtaccctcactcaaaacatcatgacctttaaaagatgttccattaatgggagaatctatggtgaagtacatgatgacctggatcagaagacagaaataactcaggaaaaagagcctgtggatttctcagtcaaatctcaagcggatagagaatttcagttctttgaccacaatctgatggaatccattaaaatgggtgatcccaaagttcatgaattccttaggttacttgctctctgccacactgtaatgtcagaagagaatagcgcaggagagctgatttaccaagttcagtcacctgatgaaggggctctagtgactgccgctagaaattttgggttcatttttaaatcccggaccccagagaccataacaatagaagaattgggaacactagttacttatcaattacttgcctttttggatttcaacaacaccagaaaaaggatgtctgtcatagttcgaaacccagaaggacagataaagctttattccaaaggagcagatactattctgtttgagaaacttcatccttccaatgaagtccttttgtctttgacgtcagaccacctcagtgaatttgcaggggaaggccttcggaccttggccatcgcatacagagacctggatgacaagtactttaaagagtggcataagatgcttgaagatgcgaatgttgccacagaagagagggatgaacgaatagctgggctatatgaagaaattgaaagagatttgatgctactaggtgccactgctgtagaagataagttacaggagggtgttattgaaacagttacaagtttatcactagccaatattaagatctgggtcctaacaggagacaaacaagaaactgccatcaacatcggttatgcctgcaacatgctgactgacgacatgaatgatgtgtttgtgatagcagggaataatgctgtggaagtgagagaagaactcaggaaagcaaaacaaaatttgtttggacaaaacagaaatttttccaatggccatgtagtttgtgaaaaaaagcagcagctggagttggattctattgtagaagaaaccataacaggagattatgccttaatcataaatggccacagtttggctcatgccctagaaagtgatgtcaagaatgatctcctagaacttgcttgcatgtgtaagactgtaatttgctgcagggtcactccactccagaaagcccaagtggtagagctggtgaagaagtacagaaatgctgttactttggccattggtgatggagccaatgatgtcagcatgattaaaagtgctcacattggtgttggcatcagcggccaggaaggattgcaagcagtcttagccagcgactattcatttgcacagtttagatatctccaaaggcttctccttgttcatggaaggtggtcttatttccgaatgtgcaaattcttatgctatttcttctataagaattttgcatttacacttgtgcatttctggtttggtttcttctgtggtttctcagcccagactgtttatgaccagtggttcatcaccctttttaacattgtttacacatcactgcctgttttagccatggggatttttgaccaggatgtgagtgaccagaacagcgtggactgtccccagctctacaaaccaggacagctgaatctgctttttaacaagcgtaaatttttcatttgcgtgatgcatggaatctacacctcattagtccttttcttcatcccctatggggccttttacaacgtggctggagaagatgggcaacatattgctgactaccagtcctttgcagttaccatggccacatctttggtcattgtggtcagtgtgcagatagccttggataccagttactggactttcattaatcacgtcttcatctgggggagcattgccatttatttctccattttatttacaatgcacagtaatggcatctttggcatcttcccaaaccagtttccatttgttggtaatgcacgacattccctgacccagaagtgcatctggcttgtaattctcttaacaacagtggcttcagttatgccagtggtggcattcagatttttgaaggtggatttatacccaaccctgagtgatcagatccgccggtggcagaaggctcaaaagaaggcaaggcctccaagtagccgaaggcctcggacccgcaggtcaagctcaagaaggtctggatatgcttttgctcaccaagaaggctatggagagcttatcacatctggaaaaaatatgcgagctaaaaatccacccccaacatcagggctggaaaagacacattataatagcactagctggattgaaaatttatgtaagaaaaccacagacaccgtgagcagctttagccaggataaaacagtgaaactgtgagtcaatatgaatttaaaccacgtagttatcttttcacttcaggtggagctgaaattctgctggctccagagtttgagatttgaggcaagaggtggggcaggcagattgcctcacttaacttaaatctgcggcagacaactgccagtgcccatcaaacaggagtgtgcgctatggaaaaccaggccagagggtcactgtctggtttgtgatttggtggacaaaacactcgctgttacaagtacagattttttttttttttaaatcaacctagataccaattgacctgaactttagaatcttatttatggagaaaaacttgtaaagctgcatattcactgaatggatcctcaggcggataaaagggtgcattttaaaggtatatatccaagctgaaaagcatgcctattgacagataaacatgtatctgtaagatcagcctttcccaaggtatacttttaaaatttaaagcgtgtactgtgttgctttcagactgagttgcatgtcactctttagtcttgatatctacctgtctgttcagccaggacaacaaatggcttccaagcctgaagaatacaaaagtgtgcttgtgtttctcatttttataccagtctagggacaaaggagactgaacatctttgcagcaggataggctggtaatttgatcaaatttattcaaaaagctctcagtctgtgtcatgtaaggacatgcttatgaaatgtgagagaggctcgccactaagtattctaaatacttttcaatggcttttctaacaacctcagtagtaatttgctgagcatcatccagaccattaatagaatcagcaaagcactggaatttcacactttaatgataatattccacatagtctatgggcaaatattttcaacatttccaatttttaaagcttcagaattgaagccaaacaaattaataaataattgttttaattactatttaaaaactcaggtttagattgtttaaaattagttgcttttgatactcagctgtcatgtttataattcaaacatgtagtaaacatatgtaggtaaggttgtttttttggagatgttgcagctcaaatttcagtccacatatgaatcatcagtgtattttccataaagtgattcgggcatatttgtgtgaaaacctcagttctgtcacttcttacctctataaacttggacgataatgtgccttctctgagactcagtttcttcctctgtaaaatgaggacatactacctacctcacgtggttggttgatgattgtctgtcaaagcacaaactctgaaattattaaaaacataattatttcataaacagatgagttaagttccagttaactcaacatcagtataacagagcaattggaagagaatatgaaaaaactggaatctaaatagtcagtgaggaaggctttgataaaatgaaattgccagaaagatataaaactggttagggtcctacagggaaataaaattataaccgtggaggtacatttctctaccagaaagcaaaaataaagcatcatgtcttaatggttttctacaaatcaacttctaattctacagagtccttaatctggtccctattaaattcttggtcagacaaagttacatttcccaagagagtcaggtgacacttgagtgagtttgatggataatgagctaatgtgatatctataggtcacaattttttaaaaccaaaattttcaagtctgggataatctttcctaaatgggatcaaatgaaataatatgtgtaaaagagtcaaatgcagtcctttaccatagtaactgcctatggacgttgtctttcccttacatgcctgcctacacttaaccagatgttggttttcaatgtctaatttgtcattagtttcaccacatttgctcactttttgtaacatttttgcaagatttgaaaactttcagtaaatgttttggcactattggtaaaaaaaaaaaaaaaaaaaaaaaaa

SEQ ID NO: 48 - DNA, 1655 bp, Homo sapiens
ccacgcgtccgggcaaagaattaaacctggtgtttggacttcaacttagcatggctagaattggaagtacagtaaacatgaacctcatgggatggctgtattctaagattgaagctttgttaggttctgctggtcacacaaccctcgggatcacacttatgattgggggtataacgtgtattctttcactaatctgtgccttggctcttgcctacttggatcagagagcagagagaatccttcataaagaacaaggaaaaacaggtgaagttattaaattaactgatgtaaaggacttctccttacccctgtggcttatatttatcatctgtgtctgctattatgttgctgtgttcccttttattggacttgggaaagttttctttacagagaaatttggattttcttcccaggcagcaagtgcaattaacagtgttgtatatgtcatatcagctcccatgtccccggtgtttgggctcctggtggataaaacagggaagaacatcatctgggttctttgcgcatagcagccactcttgtgtcccacatgatgctggcctttacgatgtggaacccttggattgctatgtgtcttctgggactctcctactcattgcttgcctgtgcattgtggccaatggtggcatttgtagttcctgaacatcagctgggaactgcatatggcttcatgcagtccattcagaatcttgggttggccatcatttccatcattgctggtatgatactggattctcgggggtatttgtttttggaagtgttcttcattgcctgtgtttctttgtcacttttatctgtggtcttactctattggtgaatcgtgcccagggtgggaacctaaattattctgcaagacaaaggaagaaataaaatttcccatactgaatgagaagttaaaatgaatgtgtcagagaatgggcttaacacatcgttggtttgaaaacttccattttaaaaatttagagtttagtcattagaaaaaataatggactggaaagttatatttatatccaaatatacctatttcaaagtgtatttgtgaggcctgttttagcctgtgtcttttgtattgtgtgttgctaaagaattctacttttagtaggctaatcaacaatgaaagggttagaaaattgctgtggaacatccaggtgaacttcaggaaagacagtgaaaaatggaaaacgttggagcttctgttgagataatcttcattaggtatatatcttagggatacagccttttctttatcttatagcaggaaaaaaaaacttttgagggaaatagaagggctgcgttacacaaaataaacaatggcattgtcataggccttccttttactagtagggcataatgctagggaatatgtgaagatgtttttttgaagtctctttctgatcacgaacaatagcttgcgctctactctgtagttatgtggattgccgagcaatgacccttttcaatttcttatttctgtgttactgaggaccctaatcacttagggatgtaattttatagtataaactttctgtacagtttttcttatagtctaataagtaaaaagtgtccttcaaattatgataattgcctatgtacatggataaattaaaacactgcacacggaaaaaaaaaaaaaaaaa

SEQ ID NO: 49 - DNA, 6297 bp, Homo sapiens
ccacgcgtccggtcagctttcatctcgtcctatctttgttcaggcaaacttctctagttctgttttaataggcatatttgttaggtctgttttttgaaatcctcttttttacattgtttaaagataatgccttggctaaaaagcctgcttcacttttccctgtttttagttgttttctccacattggcagtaaagagccttggcgtcccagtagcagcaggttctcctttttgtattgtggatgttttgcatttcatactgttgtgaagagtggctttgatcatacatgttgttggtatatttgcctttttgctgggggtgtgagaagaaccagagatgagcagaggtacacccagtagacttcccagcctgcagagcctcccgggaagagcttccgtgttcaggtgcttggggccccaccctaggagcctgactcacagtcagagcagggtcccggcttgtgttcaggattttgaaacatttgtaaggtgattttgttgtttctacacctttctcctcatctttttttttttgtagttaatcgttactaataacagaaaagacatttttggcatggtaattggcacaaagtgaataattgttgaatagatgacttttgaggctttcaaaattcgagtgtccataaaatccatccagagccacctggttcctttttttgaaccacttaacgtaattctggaaaaccttgactgtgggtcttaagtttggtggattgctgcttctcactggctgacctttggaggtcgcatatttcaggatgtgattccacttaggctccatttcacctgacactgcaattctgtgccttcagagggatttgttattgcgaatgatgtggacaacaagcgctgctacctgctcgtccatcaagccaagaggctgagcagcccctgcatcatggtggtcaaccatgatgcctccagcatacccaggctccagatagatgtggacggcaggaaagagatcctcttctatgatcgaattttatgtgatgtcccttgcagtggagacggcactatgagaaaaaacattgatgtttggaaaaagtggaccaccttaaatagcttgcagctacatggcttacagctgcggattgcaacacgcggggctgaacagctggctgaaggtggaaggatggtgtattccacgtgttcactaaaccctattgaggatgaagcagtcatagcatctttactggaaaaaagtgaaggtgctttggagcttgctgatgtgtctaatgaactgccagggctgaagtggatgcctggaatcacacagtggaaggtaacctttcctcgagaactttcattctaaagagtaggtgcagcatcactgaagtagagtcaagtttcaaagcattcacgtgtgagtaacttgaataaatactacatctggttatgccaattagaatcaatttcggagtgttatttcatgacacatttcatgacaagtggcatgtttattcctggcagtggaaaagtttttttttctccacgtacagaaataaactcttttactctcatccctgtaagggtagctttgctttttttttttttttttaaattgggccgggattcaagccttgtttccaatatgaagtaattcattacaattttaggccagaaacagcctgaggcttgtttaaaaagaaaaaaactagatggaaaatgttattttataatgcttgtcctggtttttagaataaatgtatttcatctttgtttttaacagaatttatgtattaataatttggggattttctgtaaagattgttttgttttgtcttggcaaataatcttcctatctttggagtgaatgagaatcaccatttgtcacctttgagagaatggatactcctgccctgtgatttttgttggtattggatagtgctagtaatctggaatgtaccctgtggttctgcaggtaatgacgaaagatgggcagtggtttacagactgggacgctgttcctcacagcagacacacccagatccgacctaccatgttccctccgaaggacccagaaaagctgcaggccatgcacctggagcgatgccttaggatattaccccatcatcagaatactggagggttttttgtggcagtattggtgaaaaaatcttcaatgccgtggaataaacgtcagccaaaggtgagtttttctttttccaaaatgacataacatttgatcttgtacatttaagacaaaaactaaccggagtttagtagaagtacagaggaaagaggagcttcttgctgtgggcagcaggagagctgaccctgaatgagggggaatttcatttaaatatcaagttttccaaaaagcagaaatttctcataggtgataggtaagtggagaagtcagtgtttgggggaatgtattcctgccacactgtaaatccagttatttaataaaaattgaaaagacatgaaagattgctctgtggctctcaattggaagccccaggtttctgtgctctagttccttgtgagtggttcatttcaccaattacagatagcagagctctgctgaccccaagccagcccgggttcaccttggctgcaaggaatgatgacggccttgtccagacctggctagaaagatgcagcccggcctgtttgctatggatctaaactgcctgctggttcctttccaaggcaggccaggaaacagtggtgaaggagtgttgccctcatcctaacacgcagtcctttgtaatgcgtgctgtctcacctgtatcacgccagcattatttattagttcataaatcagccttccatgatgaaagaacctggcctggaatcaaagtctggaagtctgtatttctttaagatccatgcttgaaaattaggacaaaaaacgcttagctttggaggaacaaaaaggaaacagttccgcaaagagctccagcctttttctggggcacggtttgtgcagtttaacgttggaacgtacagcctcagacgggcaaagggggcgactgcacttctgccgccaccagggtttttctgtcaggttagaaagtatttcactttgaggctaaaagtctcacaaggtatcttaacgctgatggaatgttattttcatggaatcagtataagaaattatattgtaaagtattagatactttgcattcattcatactaggtttcagtagcttgtgttttagactttgcgcttgtcacattttaagtggtcagtgaccacaggcttgtggctgcccagctgcagagcacagtgcagtcacagaggagcctgtcttagagacgcgtgctttaggttggcctgcattagggcttacattgatgtttctgacgtgttaatacttacatagaaaggttttgacattttttcaattagccccttatgtatagtcttactttttagaacaacttattgtcattttctcgtttaaataatatgaatacttctctctttctgttactatgtcagtttcttattcacttagttcaacagatctagtgctagcatggcctgtgctgctgttggtcctactgggaacgcaggtagagtctccatggtcaggatgccgtgttctgttgtggtgctgaggcctgtaagcacttggctagaagttaggccagggaagctcacactgaccttggtatttgaaggtcccagaatgaggttgttgaggtagaacagagatgggagaacatgcccttggagctggactcaacaagaaggcccctctgggggaagctgaggttggacaggaagggcgtgtgccctcactgacttgctcacaggcttggggttcatctgttttggtttttgcttttttacattatattaacatggaaataaaaggtgttccctgggatgctcccggcttctctgctcagtagctttgtggctctgagtaaaatgaacttgcctgtgttgaaatatcctaatttttaaacttacttcatagggactgaggaattacgacttttatcaattttgtgacctgttaaaatgttaaaaaggacatgtattttttaaagatctttaagtaaaacattttgctcattcccaaagccaaatttaaattataccatggccctaattcagaagttcattctttggcaggtgtttccttggtgcctggggcactctctctttctcccagttcctgtggcagtttgtccaggtgcccaagaacaattcataccctcctttctcgttatttatatacttgtctttttgcccctgccgggtattttagaaatcgtgcttggtgcactttgtgtccttcagtgtgccttacccagagcagatgcacgataagcatttttacacgagaacaagctggtggtgtaggcctctgctaaggaacaggctgtatatgctctttgtgggattaaggtagaatcagctttaactccaaagaaactgtccatgaattttgtttataatagcaagtagatttaaaatgacactttgaaaaaattctgttgtctttctctacatataatgctgtagaaaaatataactgatggattttgtgaacgtggtatttttaacttttcgtagcagcacaaagaatgctcctctttgtgtgtcaatgaaattgttctttatgacagcttcagggtaaatctgcagagaccagagaaagcacacagctgagccctgcagatctcacagaagggaaacccacagatccctctaagctggaaagtccgtcattcacaggaactggtgacacagaaatagctcatgcaactgaggatttagagaataatggcagtaagaaagatggcgtgtgtgggtaagaaaagtggttatgtcttgatctaatacgctggtgtcttcacagtccttttggattaaatgggatcccagagccacttcttggtcggtttgagggggcagtacatgtgtggtatcaggcacatgcagtgtgagggctggactctgtggaagccggaaggtttcaacatctgccgcaaaccgttccatgttgcacagaactgacagaaaggaagaatgtgcttttggtattgaaggttaccacacattacagattgatttgtctcatcctgattccctttttagtcctcctccatcaaagaaaatgaagttatttggatttaaagaagatccatttgtatttattcctgaagatgacccattatttccacctattgagtaaggattcagcctttttaattattcatttaaagaaatttactatagagtatcaaatgtacaactgatcacatgtaaccattgttttgtatgtagttctgtctagctttttttttttttttaacctttttaactgcatattagagcaggatgaaactttagaggttactcaatcttttaatttaaggagaaagtaaacttttactttgtgaacatgatagataaaaaaaaactggaccgggcgcggtggctcacggctgtaatcccagcactttgggaggccgagacgggcggagcacgaggtcaggagattgagaccatcctggctgacacggtgaaaccccgtctctactaaaaatacaaaaaaaattagccgggcgtggtggcgggcacctgtagtcccagctactctggaggctgaggcaggagaatggcgtgaacctgggaggtggagcttgcagtgagccgagatcgcgccgctgcactccagcctgggcgacagagcgagactccgtctcaaaaaaaacaaaagaaaactggactgtgattatgaatctaaattagttgtgatcctgaacctaaattactcaattgagtatatagacgagtagccaaggttgtctagttcagtttctgtagaagaaatgaagagcagcatgggtgagggctaattagggatgacatagacagaatatagaggaaaagggtttaggacaagtctgacattcatctgtttcttattcattgaattttagaatctatttaccagggcggtcacttactgtcttttttaataactggtcctttgcatacatttgtaaaagtctattaaaaaataagtctcagccgggcacatcccagcacttggggaggctgaggcaggcagatcatgaggttaggagtttgagaccagtctgaccaatgtggtgaaaccccgtctttactaaaaatacaaaaaaaaattaggtgtggtggcgtgcacctataatcacagctgctcaggctgaggcaggagaaccgcttcaacccgggaggcagaggttgcagtgagctgagactgcgccactgcactccagcttggaagacagagcaagactccatatcaaaaaaaaaaaaaaa

SEQ ID NO: 50 - DNA, 3408 bp, Homo sapiens
ccacgcgtccggaggcaggaccttgtcctattcattaatcttgcccctcaacagttattttcagaggggcaagaagtgtttcagggttcttggcccttgtttgaccagtcgtcctaaccctcatgtcttgggtcattgttgttataatctggggttaccttttggaaggtcatggggtacccttttgcaaaagttatgggccctctccttggaaactgcacacacaccatgcagcttacaattcagggagttcacaggtctacagaatcctggaaactctcatgtccggttctactcattgtagcttcagtggaaccttctagcagtcctttccagctcctccccagctcctcagctctgcttccctccgcccatcaagccctcctcagcccataaggtgggccaggtggcctgtggggataaatcagagtgcccacaagtgcaggggcccaaagacatcccagagcaaacccaagaatccctctacaagccccagcccactcagaaggatgcattttgccccctctgtttatttgtttgtttttaattatgaaagtagggcatggtcattgttgagaatgtgagaaatgcagagaagttaaaatgatgctttttgtttagggcgctgctgcttctggcttaagatcctaaatcaaagcagctgccagatctggacctaagacttgcttcccatcaccttacataaaagaaagagcactggactaggaatcaaagatctgaattcccatcaaatctctgctattactagcttttatctctatttatttatttatctgtctatctatctagtaccttttgtgaatatgagtgtttctcaccgaggccctcccatctctcttgcccccgatcctggaatggaccaaataccttgtttactgaaggatacagatggcatgtgactgttgagaatcactcaccctcttagagccatggtttcctcttctataaaatagggatgttcgtgcctatttgctaatcatgagtgacaatgacataaggtacataaagctgtactgcatgatgcaaacataacatcatatttgtagggttgttgctaataatactatccatcagcaaagcagtcattcatttactcagtcaaatactgatgcactggtacattcagtttcctcttttgtaaaatggggataaaaataggacttagctcatagggtatttaagattcagtgagttaatatatataaaatacttagagcagtccttggaacatattaagaactcaatacatattagctagttgagcaggctgtagtatttgttccagccaagaaaagactgttctctaacagcacaggaaataaagatggggttaggcacgacacggcagcaggacttaccttctgtctaattcagctggcagtcaaagaaagaattattagaagcctatgagcttggtctcccaaagatctactgagtacagggggatatttaaagaataaaaatccctagacccacttacagtacaggagagacaagaagctgttcacacaataacaagtgctaaattccttgatttttatactgacagctgaagttttagagaagagaaggatcaataaagaccggaatattaaagcagacaggcctaaaagaggattttagatttgataaagaattcctccagttctcagagcagggactttggagggtaacaacttggatttcagtccttgcctgccacttactgattgtatgaccttggaaaagttacttcacttctgtgagcaatgattctctcatctggaaaacaaaacaaaacaaaaaaactaacaagggtgataataatacctacctccctacctcatagggctgatgagaagattaaaaagtacctacataaagcccttctctgcgtgcctggagcatggcaagggctccatgtgaaccactatttttttttttttttttaatgaaaagtcatgggcagcaccaaagctcagaattttggcagtaaggaattatgattctacattgaaatttgccagaaggggagctgactgcctcatgagacatttttgaatgaggccaaaaaaggaaacaagtgtatcctgggattttacgagatgctaggtatgtccttagcacttaatcctcatgactaccctatgatgtaagtactatctgttgtccctattttacagttggccaaggtcacatagctgaaacggacttctgtgtgtcttctaacttttgctttcaggtctggaaaaatgcaatgtaaacctagaccctctttgaaatactgaagatggtaatcttatcccttcctcactttctgttttctaaaataacagtccttgttccttacaatgtctgttttccagattcttagaagactttttgcttattttccataactctttacttgtgatccctgaatgacaccgggggtatagcagagaatgtccatttcctcaaagttcaaaggtcctacaaaaaatagttgctagcctggcatgatggtgtgtgcctgtggcctcagctacctgggaggctgaggcaggaggattgcttgagctgaggagtttgaggcgcagcgtgatcgcggctcaccgcagcctcccgggctcaagcattcctctcgcctcagcctcctgagtagctgggaccacagctccactaattttgaagtttttttggtagacatgaagtctccctgtgttgcccgggctggtctcaaactcctgacctcaagcagtcctcctgtcttggcctctggaaatgctgggattacaggcgtgagccactgtgctggcctcttttttctttttctttttttttaaggtttttatttgttaaatgggaagtctgtgccatcaactgagcattgtattttctccttagtaagagcctgggtgggccactgggagagaactatacattaaatgtaagtagcctctgggtagagagcccctggctggtttcctttcctttctctccttttctctactttggtgtctggaggcatttcccagactccagtttcttaccaccctcacggattttgctattgtattatcacctcctttatcattcccaaaattgactttatggagactcattaaaagaaagaatcatcggccgggagcggtggctcacgccacgaaggcgggcgaatcacctgaggtgcggagttcgtgaccagcctgaccaaaacagagaaaccccatctctactaaacaatacaaaattagctgggcgtggtggtgcacgcctgtaatcccagctactggggaggctgggacgggagaatcacttgaacccgggaggcagaggttgcagtgaccaaagatcgcactattgcactccagcctgggcaacaagagcaaaactctatctcaaaaaaaaaaaaaaaaaaaaaaaaaa

SEQ ID NO: 51 - DNA, 1663 bp, Homo sapiens
tcgacccacgcgtccgggcagtggggtgagggcacacaagcagttcagggtcccagcaggaagtggggctgcagggccggggtgggtcctgggcctggccatcaggcagcctagcaggttgttctgggcatggagggggcctggtgtggctgagggcatgcccagggctccctggaggatcccgctctgtgccctgcccaccctgtgcctggggagccctctgccctcacagcccacccaccccattttctatgaccacagagctccgacctggaagatggctcacccaggaggtcccaggagctctcactcccccaggacctggaggacacccagctctcagacaaaggctgccttgccggcggggggagcccgaaacagccctttgcagctctgcaccaggagcaggttttgcggaacccccatgtaaggcttccccggggtggggtcctcccagccgtgggcctcagggtgaccgatcacagggagagtggctccctgccctgggcaccccctgcggtggccccgacgacagctgaggagtgaccacaaggtctctgcccacagtgctcggggtgcggtgtctgggctgcgaagtggatccccctcctttcttgggcactgcagcagcttggggggctttttggacgtggatgtgcctggtcctggtttcccgagggcctttacagtggatgaggaggtgaacacaggagtcctgagagcaagcaccacctcgggctttgttgtagaaacaatggcccggaccccaggccggagccgtggcttggcctcctgggtgtgtcttggcatctgaaatgcaggctacccacaccggctcacctccaggggtacaggcaggtcccacagggagagcttggcgctgagctgaggctgtctgggctcctcgcctcccaaccagtctgcagttacaggggccagtggggggcgggtgagaaggacgggttccctcaggggagccggccggagcccgagccttcccccttctccaggacgcaggcctgagcagcggggagccgcccgagaaggagcggcggcgcctcaaagagagttttgagaactaccgcaggaagcgcgccctcaggaagatgcagaaaggatggcggcagggggaggaggaccgggagaacaccacgggcagcgacaacaccgacactgagggctcctagccgcagcagcgcaggccccgaccagggcacacccaccggcccggcctcctgccacccgggggtgccgacgccctggggcgcagacttccccgagccgtcgctgacttggcctggaacgaggaatctggtgccctgaaaggcccagccggactgccgggcattggggccgtttgttaagcggcactcattttgcggaggccatgcgggtgctcaccacccccatgcacacgccatctgtgtaacttcaggatctgttctgtttcaccatgtaacacacaatacatgcatgcattgtattagtgttagaaaacacagctgcgtaaataaacagcacgggtgacccgcaaaaaaaaaaaaaaaaaaaaaaaaaaaaaaaaaaaaaaaaaaaaaaaaaaaaaaaaaaaaaaaaaaaaaaaaaaaaaaaaaaaaaaaaaaaaaaaaaaaaaaaaaaaaaaaaaaaaaaaaaaaaaaaaaaa

SEQ ID NO: 52 - DNA, 2343 bp, Homo sapiens
agtcaggactcccaggacagagagtgcacaaactacccagcacagccccctccgccccctctggaggctgaagagggattccagcccctgccacccacagacacgggctgactggggtgtctgccccccttgggggggggcagcacagggcctcaggcctgggtgccacctggcacctagaagatgcctgtgccctggttcttgctgtccttggcactgggccgaagcccagtggtcctttctctggagaggcttgtggggcctcaggacgctacccactgctctccgggcctctcctgccgcctctgggacagtgacatactctgcctgcctggggacatcgtgcctgctccgggccccgtgctggcgcctacgcacctgcagacagagctggtgctgaggtgccagaaggagaccgactgtgacctctgtctgcgtgtggctgtccacttggccgtgcatgggcactgggaagagcctgaagatgaggaaaagtttggaggagcagctgacttaggggtggaggagcctaggaatgcctctctccaggcccaagtcgtgctctccttccaggcctaccctactgcccgctgcgtcctgctggaggtgcaagtgcctgctgcccttgtgcagtttggtcagtctgtgggctctgtggtatatgactgcttcgaggctgccctagggagtgaggtacgaatctggtcctatactcagcccaggtacgagaaggaactcaaccacacacagcagctgcctgactgcagggggctcgaagtctggaacagcatcccgagctgctgggccctgccctggctcaacgtgtcagcagatggtgacaacgtgcacttcggcctctccctgtactggaatcaggtccagggccccccaaaaccccggtggcacaaaaacctgactggaccgcagatcattaccttgaaccacacagacctggttccctgcctctgtattcaggtgtggcctctggaacctgactccgttaggacgaacatctgccccttcagggaggacccccgcgcacaccagaacctctggcaagccgcccgactgcgactgctgaccctgcagagctggctgctggacgcaccgtgctcgctgcccgcagaagcggcactgtgctggcgggctccgggtggggacccctgccagccactggtcccaccgctttcctgggagaacgtcactgtggacaaggttctcgagttcccattgctgaaaggccaccctaacctctgtgttcaggtgaacagctcggagaagctgcagctgcaggagtgcttgtgggctgactccctggggcctctcaaagacgatgtgctactgttggagacacgaggcccccaggacaacagatccctctgtgccttggaacccagtggctgtacttcactacccagcaaagcctccacgagggcagctcgccttggagagtacttactacaagacctgcagtcaggccagtgtctgcagctatgggacgatgacttgggagcgctatgggcctgccccatggacaaatacatccacaagcgctgggccctcgtgtggctggcctgcctactctttgccgctgcgctttccctcatcctccttctcaaaaaggatcacgcgaaagggtggctgaggctcttgaaacaggacgtccgctcgggggcggccgccaggggccgcgcggctctgctcctctactcagccgatgactcgggtttcgagcgcctggtgggcgccctggcgtcggccctgtgccagctgccgctgcgcgtggccgtagacctgtggagccgtcgtgaactgagcgcgcaggggcccgtggcttggtttcacgcgcagcggcgccagaccctgcaggagggcggcgtggtggtcttgctcttctctcccggtgcggtggcgctgtgcagcgagtggctacaggatggggtgtccgggcccggggcgcacggcccgcacgacgccttccgcgcctcgctcagctgcgtgctgcccgacttcttgcagggccgggcgcccggcagctacgtgggggcctgcttcgacaggctgctccacccggacgccgtacccgcccttttccgcaccgtgcccgtcttcacactgccctcccaactgccagacttcctgggggccctgcagcagcctcgcgccccgcgttccgggcggctccaagagagagcggagcaagtgtcccgggcccttcagccagccctggatagctacttccatcccccggggactcccgcgccgggacgcggggtgggaccaggggcgggacctggggcgggggacgggacttaaataaaggcagacgctgtttttctaccc

SEQ ID NO: 53 - DNA, 3091 bp, Homo sapiens
aaaccggaaagtttgtaggaaaattgctgcacatggcctttgcagaaaagagagccttcaaaacctcttacattccagtagaaaactctctctgcaagtccttaactttgttcactcattccaggaaggtgcttcaatattggatattcacacagagcccagtttttcaagtttgctttcacagtcatcgtatgctgacatgggtgttccacttcctgcaaaaaacttaatatttaaagatggtgtcttatcagaakggagtggacggtcaccttcctcacttcttattgctaatctccatttgcaataatttggttacaccatttgttgctcacactttctgccttttttctttcttaacgttagctttatagtgtcagccactaaaaagcatcctgctgctgcagtgcaattcttgcttaactaatattaaaagttggggaacatattcatgttttctgaagttttgctcattattgcacatcttattgcgacaaagtgctttttagcagccagcactgtattttttaccttgagacaatctgcatttcttttataaaactaagtatatactttataggctttatgatgactgttatgtttataagcagtcactatgaaaattgcaatggtaattttatatgttagtttatcaaacataaatcttgtttaattttatattttgttacctatactttgggggatcaagggaagagatggaactcttcctctgaaaaggcttcttggtacttaaagtagtaaaactataaaacaataaacatccagtattgagagatgatatgatagggcattatgaattcctatgggtgtctgtaaattatgtatgtcagttggacattgtagaaggtatgtaaatcagcatagttgtgtataacttaaccttgatttataaggtcttaagattatgactattcattgacatctcatgagaagctttagaagactttctatttttaaacaccatttatatgtggacttctgttgtcactgactttgggctttatattttcatagagtctttatggaaaaaatagaatttattttccactcttgtagctatagctgctgcacactttcaccctgatttatttttttgtttcttagctttgatgttttcaaaccaaggattgtgattttaggttagaattacatattagaagcattaagactatgtctttggatcagaatgctttagtgataaacctactttgaagacatactcttaagcaatctggatcttaaatttatgtgaatacttttttagaaaatgataaagaaaaatggaattacttcaaagtgtttcttgagtcattgattcttttagcatctcaaatgttaattagaataattggaatcactttttagacttttcaagttaccttccttgggaagtttgtgcagtgttatagtttagtttagctcctcttacagggtaatggtttgctagtttaaaactgtaaccaaacgaactggtcagacaacatatatctaaaacacttaaaatgttaggaagtttgggaatgttataacctaaacgtttttgctggtaactttttgttatttatagatatttgtgtatttaacatacatacttcaggaaatatatgcctttcctaaaacttaaccatgcattcaataccatggcctatctatagaattgaatattttggaccatgttatctgtggcacagtcagtgctgtgtttgaggtaaatgcagtaacggttagttttctactttgtcttatagaaggtagaaaccatgtgtatgttatgtttgtctataaaagaaaaaatactaatattaaataatttcttacgactctgagtcactcacttatttttccaataattgatattgtacattcctagtgccattaggtatgtatgtatgtaacttttacagtttttcagctgaaagttgtaagtattttttttttttgatcggggctctttaatctcattttaatttcctttgtttgaactgtagttatttattcctatattaaccatctaaaccaactgtaatgacatgtacactaatacagaattgaacatttgtagttgttggcagtgaacccagttgttggtgaatttaaagcttaaaatatgggaatgatttgctgctatatttcctttgagagagaaaggaggaagaaatagaacctaatagtgatcatgaattttagggaaagtaccgaagaaccatggggtcccctctggtttcttgtgttgaatgaggcaagggtaatcatctgattccgagctgaagacctctggtcctcttaaggagggagagtgcatttttagagcttttagcaaaatgtgaaaagctgatgtttgcgccttgctttgtgaatttggctttgttttacttatacattaactcatgtaatctcttaaatcttacaagcattgatccatttcaacaaaaaggtaaatttaaaatgcagactttgttatttgccaaagaagattcatgaaaaatttacgtccaattattttgcaaatagttaatttcatttggctttttaccatgttccttcctttctttttcccgcttccttaatgtaatttaaaccctggcaaacattctttagaaaccaagaggaaagaaagaacaaatatcaaaaaagacatagaatttaatattgatacaatttcacctctaaaatggatttgaagaaatgcaactttatatcaaaaaatgtcatctgatttcctttgtttcttttttaaattatgtaatcagatgattttatgtttttttttcaggggagcggaatattggtttcttttacttgttgttttcagttttctctgccattcatgtttcttttttgtgttcagtgtttcaaatacaatttgtatttaaggattttaaaataccaaactgtaactgagtacagtggatcgttttctgttaggatgttaatattatacaatgaaatctataaagtgttgtcaatttgattattgacacatataacatgtttacaaataaactgtggtattgatcaagttactatgaaaaaaaaaaaaaacccggggggggccccggaacccaatccc

SEQ ID NO: 54 - DNA, 1748 bp, Homo sapiens
agacgttccctcgcggccctggcacctccaaccccagatatgctgctgctgctgctgctgcccctgctctgggggagggagagggtggaaggacagaagagtaaccggaaggattactcgctgacgatgcagagttccgtgaccgtgcaagagggcatgtgtgtccatgtgcgctgctccttctcctacccagtggacagccagactgactctgacccagttcatggctactggttccgggcagggaatgatataagctggaaggctccagtggccacaaacaacccagcttgggcagtgcaggaggaaactcgggaccgattccacctccttggggacccacagaccaaaaattgcaccctgagcatcagagatgccagaatgagtgatgcggggagatacttctttcgtatggagaaaggaaatataaaatggaattataaatatgaccagctctctgtgaacgtgacagccttgacccacaggcccaacatccttatccccggtaccctggagtctggctgcttccagaatctgacctgctctgtgccctgggcctgtgagcaggggacgccccctatgatctcctggatggggacctctgtgtcccccctgcacccctccaccacccgctcctcagtgctcaccctcatcccacagccccagcaccacggcaccagcctcacctgtcaggtgaccttgcctggggccggcgtgaccacgaacaggaccatccaactcaatgtgtcctaccctcctcagaacttgactgtgactgtcttccaaggagaaggcacagcatccacagctctggggaacagctcatctctttcagtcctagagggccagtctctgcgcttggtctgtgctgttgacagcaatccccctgccaggctgagctggacctggaggagtctgaccctgtacccctcacagccctcaaaccctctggtactggagctgcaagtgcacctgggggatgaaggggaattcacctgtcgagctcagaactctctgggttcccagcacgtttccctgaacctctccctgcaacaggagtacacaggcaaaatgaggcctgtatcaggagtgttgctgggggcggtcgggggagctggagccacagccctggtcttcctctccttctgtgtcatcttcattgtagtgaggtcctgcaggaagaaatcggcaaggccagcagcggacgtgggagacataggcatgaaggatgcaaacaccatcaggggctcagcctctcagggtaacctgactgagtcctgggcagatgataacccccgacaccatggcctggctgcccactcctcaggggaggaaagagagatccagtatgcacccctcagctttcataagggggagcctcaggacctatcaggtcaagaagccaccaacaatgagtactcagagatcaagatccccaagtaagaaaatgcagaggctcgggcttgtttgagggttcacgacccctccagcaaaggagtctgaggctgattccagtagaattagcagccctcaatgctgtgcaacaagacatcagaacttattcctcttgtctaactgaaaatgcatgcctgatgaccaaactctccctttccccatccaatcggtccacactccccgccctggcctctggtacccaccattctcctctgtacttctctaaggatgactactttagattccgaatatagtgagattgtaacgtgaaaaaaaaaaaaaaaaaaaaaaaa

SEQ ID NO: 55 - DNA, 766 bp, Homo sapiens
  misc_feature (670)..(670): n equals a,t,g, or c
  misc_feature (713)..(713): n equals a,t,g, or c
  misc_feature (721)..(721): n equals a,t,g, or c
  misc_feature (728)..(728): n equals a,t,g, or c
  misc_feature (731)..(731): n equals a,t,g, or c
  misc_feature (756)..(756): n equals a,t,g, or c
ggcgagacgcgttcaccaccatatgcactgttgtcaactcccctggagatgcgcccaagccccacaggaagccttcctcctctgcctcctcttcctcatcctcgtcctcgttctccttggatgcagccggggcctccctggccacactccctggaggctccatcctgcagccgcggccctccttgcccctctcctccacgatgcacttggggcctgtggtttccaaggccctgagtacctcttgccttgtttgctgcctctgccaaaacccggccaacttcaaggaccttggggacctctgtgggccctactaccctgaacactgcctccccaaaaagaagccaaaactcaaggagaaggtgcggccagaaggcacctgtgaggaggcctcgctgccgcttgagagaacactcaaaggtcccgagtgtgcagctgccgccactgccgggaagccccccaggcctgacggcccagctgacccggccaagcagggcccactgcgcaccagtgcccggggcctgtcccggaggctgcagagctgctactgctgtgatggccgggaggatgggggcgaggaggcagccccagccgacaagggtcgcaaacatgagtgcagcaaggaggctccggcagagcccggcggggaggcccaggaagcactgggtgmatnaagcctgttmccgtgttggaccgggggggttttaactggtggncggggaantcttttnggnttgcaagaggccaattaaagttggnccttggaaaa

SEQ ID NO: 56 - DNA, 2803 bp, Homo sapiens
cccacgcgtccgcgacccacgcgtccggggggaggtaactgcagtaagtcccgcttggccctggagtccacgcggattttcgaagctggggctggcaagaggccgctggacaccacgctccagtcgtcagcccacttcctagctgaacagcgcgaggcggcggcagcgagccgggtcccaccatggccgcgaattattccagtaccagtacccggagagaacatgtcaaagttaaaaccagctcccagccaggcttcctggaacggctgagcgagacctcgggtgggatgtttgtggggctcatggccttcctgctctccttctacctaattttcaccaatgagggccgcgcattgaagacggcaacctcattggctgaggggctctcgcttgtggtgtctcccgacagcatccacagtgtggctccggagaatgaaggaaggctggtgcacatcattggcgccttacggacatccaagcttttgtctgatccaaactatggggtccatcttccggctgtgaaactgcggaggcacgtggagatgtaccaatgggtagaaactgaggagtccagggagtacaccgaggatgggcaggtgaagaaggagacgaggtattcctacaacactgaatggaggtcagaaatcatcaacagcaaaaacttcgaccgagagattggccacaaaaaccccagtgccatggcagtggagtcattcatggcaacagccccctttgtccaaattggcaggtttttcctctcgtcaggcctcatcgacaaagtcgacaacttcaagtccctgagcctatccaagctggaggaccctcatgtggacatcattcgccgtggagactttttctaccacagcgaaaatcccaagtatccagaggtgggagacttgcgtgtctccttttcctatgctggactgagcggcgatgaccctgacctgggcccagctcacgtggtcactgtgattgcccggcagcggggtgaccagctagtcccattctccaccaagtctggggataccttactgctcctgcaccacggggacttctcagcagaggaggtgtttcatagagaactaaggagcaactccatgaagacctggggcctgcgggcagctggctggatggccatgttcatgggcctcaaccttatgacacggatcctctacaccttggtggactggtttcctgttttccgagacctggtcaacattggcctgaaagcctttgccttctgtgtggccacctcgctgaccctgctgaccgtggcggctggctggctcttctaccgacccctgtgggccctcctcattgccggcctggcccttgtgcccatccttgttgctcggacacgggtgccagccaaaaagttggagtgaaaagaccctggcacccgcccgacacctgcgtgagccctaggatccaggtcctctctcacctctgacccagctccatgccagagcaggagccccggtcaattttggactctgcactccctctcctcttcaggggccagacttggcagcatgtgcaccaggttggtgttcaccagctcatgtcttccccacatctcttcttgccagtaagcagctttggtgggcagcagcagctcatgaatggcaagctgacagcttctcctgctgtttccttcctctcttggactgagtgggtacggccagccactcagcccattggcagctgacaacgcagacacgctctacggaggcctgctgataaagggctcagccttgccgtgtgctgcttctcatcactgcacacaagtgccatgctttgccaccaccaccaagcacatctgtgatcctgaagggcggccgttagtcattactgctgagtcctgggtcaccagcagacacactgggcatggacccctcaaagcaggcacacccaaaacacaagtctgtggctagaacctgatgtggtgtttaaaagagaagaaacactgaagatgtcctgaggagaaaagctggacatatactgggcttcacacttatcttatggcttggcagaatctttgtagtgtgtgggatctctgaaggccctatttaagtttttcttcgttactttgctgcttcatgtgtactttcctaccccaagaggaagttttctgaaataagatttaaaaacaaaacaaaaaaaacacttaatatttcagactgttacaggaaacaccctttagtctgtcagttgaattcagagcactgaaaggtgttaaattggggtatgtggtttgattgataaaaagttacctctcagtattttgtgtcactgagaagctttacaatggatgcttttgaaacaagtatcagcaaaaggatttgttttcactctgggaggagagggtggagaaagcacttgctttcatcctctggcatcggaaactcccctatgcacttgaagatggtttaaaagattaaagaaacgattaagagaaaaggttggaagctttatactaaatgggctccttcatggtgacgccccgtcaaccacaatcaagaactgaggcctgaggctggttgtacaatgcccacgcctgcctggctgctttcacctgggagtgctttcgatgtgggcacctgggcttcctagggctgcttatgagtggttctttcacgtgttgtgtccatagctttagtcttcctaaataagatccacccacacctaagtcacagaatttctaagttccccaactactctcacacccttttaaagataaagtatgttgtaaccaaaaaaaaaaaaaaaaaaaaaaaaaaaaaaaaaaaaaaaaaaaaaaaaa

SEQ ID NO: 57 - DNA, 2181 bp, Homo sapiens
  misc_feature (5)..(5): n equals a,t,g, or c
gtacnggattcccgggtcgacccacgcrtccggcaggcagaggggcagtgggcgcggggaagatgattctgggcctcccccatctactgtcattaaccaaaatgaaacatttgccaacataatttttaaacctactgtagtacaacaagccaggattgcccagaatggaattttgggagactttatcattagatatgacgtcaatagagaacagagcattggggacatccaggttctaaatggctattttgtgcactactttgctcctaaagaccttcctcctttacccaagaatgtggtattcgtgcttgacagcagtgcttctatggtgggaaccaaactccggcagaccaaggatgccctcttcacaattctccatgacctccgaccccaggaccgtttcagtatcattggattttccaaccggatcaaagtatggaaggaccacttgatatcagtcactccagacagcatcagggatgggaaagtgtacattcaccatatgtcacccactggaggcacagacatcaacggggtcctgcagagggccatcaggctcctcaacaagtacgtggcccacagtggcattggagaccggagcgtgtccctcatcgtcttcctgacggatgggaagcccacggtcggggagacgcacaccctcaagatcctcaacaacacccgagaggccgcccgaggccaagtctgcatcttcaccattggcatcggcaacgacgtggacttcaggctgctggagaaactgtcgctggagaactgcggcctcacacggcgcgtgcacgaggaggaggacgcaggctcgcagctcatcgggttctacgatgaaatcaggaccccgctcctctctgacatccgcatcgattatccccccagctcagtggtgcaggccaccaagaccctgttccccaactacttcaacggctcggagatcatcattgcggggaagctggtggacaggaagctggatcacctgcacgtggaggtcaccgccagcaacagtaagaaattcatcatcctgaagacagatgtgcctgtgcggcctcagaaggcagggaaagatgtcacaggaagccccaggcctggaggcgatggagagggggacmccaaccacatcgagcgtctctggagctacctcaccacaaaggagctgctgagctcctggctgcaaagtgacgatgaaccggagaaggagcggctgcggcagcgggcccaggccctggctgtgagctaccgcttcctcactcccttcacctccatgaagctgagggggccggtcccacgcatggacggcctggaggaggcccacggcatgtcggctgccatgggacccgaaccggtggtgcagagcgtgcgaggagctggcacgcagccaggacctttgctcaagaagccataccagccaagaattaaaatctctaaaacatcagtggatggtgatccccactttgttgtggatttccccctgagcagactcaccgtgtgcttcaacattgatgggcagcccggggacatcctcaggctggtctctgatcacagggactctggtgtcacagtgaacggagagttaattggggcacccgcccctccaaatggccacaagaaacagcgcacttacttgcgcactatcaccatcctcatcaacaagccagagagatcttatctcgagatcacaccgagcagagtcatcttggatggtggggacagactggtgctcccctgcaaccagagtgtggtggtggggagctggggkctggaggtgtccgtgtctgccaacgccaatgtcaccgtcaccatccagggctccatagcctttgtcatcctcatccacctctacaaaaagccggcgcccttccagcgacaccacctgggtttctacattgccaacagcgagggcctttccagcaactgccacggactgctgggtcagttcctgaatcaggatgccagactcacagaagaccctgcagggcccagccagaacctcactcaccctctgctccttcaggtgggagaggggcctgaggccgtcctaacagtgaaaggccaccaagtcccagtggtctggaagcaaaggaagatttacaacggggaagagcagwtagaytgytggtttgccaggaacatgccgccaaactgattgacggggagtacaggattacctggcat

SEQ ID NO: 58 - DNA, 2207 bp, Homo sapiens
ccacgcgtccggaaaaagggaaaagatgccgtgtaaaatctcgttctgtgtctgaattgccgtagggctcagatcttcatttgaggttctgtgtctgaattgccgtagggctcagatcttcatttgaggttatgttctataagttaacgttgatcttgtgtgagctttcggtagctggagtaacacaggcggcctcacagcgacctctccagcgccttccaaggcacatctgcagccagcgtagctcctcctgggagatgcctcctcaaggccctgctccagaccacgtggggagggcctgacagccaattcccaggctgtccccacccttggagagtgaccctaaacgctagacagatggggaatgggaaagaaaagaaagctgcagacctcaagttaaaattccctcaaaaacgtttttatttatctgctttttctgaaaggataaaggctttttgaaaattattttctaacaaataacatgaacacttctagaaaccctagaaaaacacaaagtattcaaaatagaaagaaaaattacccattactctttaagccagcattatccattgcggtgcttttggagttgggtgaggccgtagcctctgccaagtcaaggagcccggtggtggctgtggcattcctgcagggttgtttttttttctttgagatggagtctcactcttgtcaccccagctggaatgtggtggtgtaaacagctcactgcagccttgaccctgaggctcaagcgatccttctgccttggcctcctgagtagctgggatcccaggcgagagtcaccacaccctgtccatgttcctgcaggtcttgatatgcgaggacgctgtgtcttccctgccacattttcttcttctttcttgagacagacccttgctccatcacccaggccagagtgtggtggtgcgaacacggctcactgcagcctcgaccctcaggctcaagcgatcctcacgcctcggacccccaaagtgctgggatcacaggcgagagtcaccatgctggcctgaatcttcagggtattttacggttgaagtgtcacttacttaaccatccctgtttcaagagtgtaggtggtcaccctgtctctgccgctgacctggcctggaccctcggctgtgagagggaggggtgggctgggctggaggaacctgaagccctcgtgatgtcacaagcccatctggctgggcatcccctgctgtgtcctgagctgcacatgccccaggtggcccccacagcagaggcgagccactggagggtggagggcttccacgggacggtcttcagggggagaaggaagggcccaggcccccaggagactcaggagaccagagcctggggtcaggggctcagccaggggctcagccagggctggatgtccggagccagccccgcagccctgtgttctttgttcttcgcactcccaccgtccgtgtgaacagctccagccccacctgcgcctccctgtgctgggctccatcagggagcccagaagacgtgtgtgcttctgaaattgggtccctacatgcctttgtcccagtgcaccttgctccttccatttactatcgagatttaaatgcctgttttctccccagaggttgacggatatattcagacgttacgacacggatcaggacggctggattcaggtgtcgtacgaacagtacctgtccatggtcttcagtatcgtatgaccctggcctctcgtgaagagcagcacaacatggaaagagccaaaatgtcacagttcctatctgtgagggaatggagcacaggtgcagttagatgctgttcttcctttagattttgtcacgtggggacccagctgtacatatgtggataagctgattaatggttttgcaactgtaatagtagctgtatcgttctaatgcagacattggatttggtgactgtctcattgtgccatgaggtaaatgtaatgtttcaggcattctgcttgcaaaaaaatctatcatgtgcttttctagatgtctctggttctatagtgcaaatgcttttttagccaataggaattttaaaataacatggaacttacacaaaaggcttttcatgtgccttacttttttaaaaaggagtttattgtattcattggaatatgtgacgtaagcaataaagggaatgttagacgtgtaaaaaaaaaaaaaaagggcggccgctctagaggatcc

SEQ ID NO: 59 - DNA, 3533 bp, Homo sapiens
  misc_feature (44)..(44): n equals a,t,g, or c
ttttatttacttcaaattaactgtactttactcaaatagaaaangaataattttcacattatgaagctacacaattccaaaatacacatgctgaggctctttttaagtccgaattgtctagtaattacaaaaaagtgaagagtttacagatatacaaggaaataaaggcgaattattgcaaagaaaacaagtttaatttcactttgaatgacaacgatttttctggaaagcagatacttcactcctttaagtttccacccaagccacaataatttcaaacggtcttgcggatgacccagctggtcactcttgtttatgtggggactggaggtaatgagagccaaaaaaagtgctataaacctaatttggctagagcaagttcacacgacacgaccgtgctttaaaaacttgctctccattatgtacttccttccatcaggttggggaaaaaaaaatggtggggatggtgagtaaacacaccagtggtttcatcagaggggaactcactactcaggaggtgacggtgacgtggtgccggtccctgaagtacgcgcacaagctccggaggttgcgggagcttccgctgccgcctggagggaagccggagcgacgggggtcacggcggcggtcagagggtaaaggtcttgctcccagcagcctccgcggtggatacgtcgccatcttggatccgcgggacaagaaaattcatgcgagggagacgtggtgggcggtccttcctgtgacacgacccttgagtgacagttctatttgattgcctccggtactgtgaggaaaggacacgactctatggtgaggactgatggacatacattatctgagaaaagaaactaccaggtgacaaacagcatgtttggtgcttcaagaaagaagtttgtagagggggtcgacagtgactaccatgacgaaaacatgtactacagccagtcttctatgtttccacatcggtcagaaaaagatatgctggcatcaccatctacatcaggtcagctgtctcagtttggggcaagtttatacgggcaacaaagtgcactaggccttccaatgagggggatgagcaacaatacccctcagttaaatcgcagcttatcacaaggcactcagttaccgagccacgtcacgccaacaacaggggtaccaacaatgtcacttcacacgcctccatctccaagcaggggtattttgcctatgaatcctargaatatgatgaaccactcccaggttggtcagggcattggaattcctagcaggacaaatagcatgagcagttcagggttaggtagccccaacagaagctcgccaagcataatatgtatgccaaagcagcagccttctcgacagccttttactgtgaacagtatgtctggatttggaatgaacaggaatcaggcatttggaatgaataactccttatcaagtaacatttttaatggaacagacggaagtgaaaatgtgacaggattggacctttcagatttcccagcattagcagaccgaaacaggagggaaggaagtggtaacccaactccattaataaaccccttggctggaagagctccttatgttggaatggtaacaaaaccagcaaatgaacaatcccaggacttctcaatacacaatgaagattttccagcattaccaggctccagctataaagatccaacatcaagtaatgatgacagtaaatctaatttgaatacatctggcaagacaacttcaagtacagatggacccaaattccctggagataaaagttcaacaacacaaaataataaccagcagaaaaaagggatccaggtgttacctgatggtcgggttactaacattcctcaagggatggtgacggaccaatttggaatgattggcctgttaacatttatcagggcagcagagacagacccaggaatggtacatcttgcattaggaagtgacttaacaacattaggcctcaatctgaactctcctgaaaatctctaccccaaatttgcgtcaccctgggcatcttcaccttgtcgacctcaagacatagacttccatgttccatctgagtacttaacgaacattcacattagggataagctggctgcaataaaacttggccgatatggtgaagaccttctcttctatctctattacatgaatggaggagacgtattacaacttttagctgcagtggagctttttaaccgtgattggagataccacaaagaagaacgagtatggattaccagggcaccaggcatggagccaacaatgaaaaccaatacctatgagaggggaacatattacttctttgactgtcttaactggaggaaagtagctaaggagttccatctggaatatgacaaattagaagaacggcctcacctgccatccaccttcaactacaaccctgctcagcaagccttctaaaaaaaaaaaaaaaaaaaaaaaaaaagacttcccttttcttggggtatggctgtctcagcacaatactcaacataactgcagaactgatgtggctcaggcaccctggttttaattccttgaggatctggcaattggcttacgcaaaaggtcaccatttgaggtcctgccttactaattatgtgctgcccaacaactaaatttgtaatttgtttttctctagtttgagcagggtctgaattttttcatttatttccttttttgccagcagacagacttgagtctgtaaagacaagcaaatacactgacagaagtttaccatagtttctaaaatgtaaaaaagaaaacccccaaaagactcaagaaaattagaccacaaattttgcattgttcattgtagcactattggtaataaaataacaaatgtttgtgcatttttatgtgaagatccttctcgtatttcatttggaaagatgagcaagaggtctgcttccttcattttacttccccttctgtttttgaaaggcagtttcgccaagcttaatgcaagaatatctgactgtttagaagaaagatattgccacaatctctggatggttttccagggttgtgttattactgagcttcatctttccagaatgagcaaaacactgtccagtctttgttacgattttgtaataaatgtgtacattttttttaaatttttggacatcacatgaataaaggtatgtatgtacgaatgtgtatatattatatatatgacatctattttggaaaatgtttgccctgctgtacctcatttttaggaggtgtgcatggatgcaatatatgaaaatgggacattctggaactgctggtcaggggactttgtcgccctgtgcactaaaagggccagattttcagcagccaaggacatccatacccaagtgaatgtgatgggacttaaaagaagtgaactgagacaattcactctggctgtttgaacagcagcgtttcataggaagagaaaaaaagatcaatcttgtattttctgaccacataaaggcttcttctctttgtaataaagtagaaaagctctcctcaaaaaaaaaaaaaaaaaactcgag

SEQ ID NO: 60 - DNA, 867 bp, Homo sapiens
ggcacgagcaggtactgggtgactgcctggctgaggaaaagttaactagacacttggggaaaggagatccaagggagtaagaggcaaaatgcctttgcatgcttttcttcctatctctttttctttctctccttctcactctctcccttccttcctttcttcctttctctttcttttttttttctcttttcccccacctctctgcctgcctccttccttccctcccctcccctcccttccccctccctccctccctcccttccttccttccttccttccttccttccttccttccctccctcctctctccctccttccctgccttctttccttcgttctgccaacttgccagaaggagcccaagaaaaagcacccagatgcttcagtcaacttcttagaattcttcttttttttatgttcagaaaagatggaaattcatttctgctaaagagaaagaaaaaattggaagacagggtgaaggtgaacaggcccattataagaaagaaacaaaaatctatattctgtctacaaggaagcgagagagagaaagagagagaagaaagaagttccaggattctaatgtaccaaagggatctcctttttcttgttttgttctgaaaatttcaccaaaagagcacaggagaacatcttggctaattcattggcgatgatgtaagaaaactgagagaaatgaaagaaatgaagaattactgctgcagataatatacagccttgaggaaagaaaggcttttaagattatagatataaaggctattgctgtattctgggataaaagaaagtctgatgtcagggaaaggggaagttggaaaaactggaaaaagaaaaaagaaaaaaaaaaaaaaaaaa

SEQ ID NO: 61 - DNA, 1558 bp, Homo sapiens
ggttttggagtatatatattgtatgccatgaactatatttttctgcttatggctttgcctcatttaattgccatagcacttacatggggcaggtattcattttcctgcttagcaaataaggaaactgaatttcagagatgtcaggtaacctgcctacttcacacactaggagttttgatgtttaattttgaactaagatctatctggcttgaaagctctttgcattaaacaaccttgaacaatatacttggaacgtaggtgtgtttttggcacagaacatggcatgtgtgtgagggattgaacacagacttgcccagattcaaacttaccaatcttctgtttcatgtgcccagaagaaacagcctgtttctcagcctcaaacccaaacttctagttgtcttgattggttcagcctgactgtccaactctgatttatagctgtgattgggggagctgagattacacagtgtaggcaggcagaagggccccaggcctattgatatgggtgaggacaatactcacgcactcccttcacttactcactcttccaaggtcttggcttgaacccaattttttttgagagaataaaccaggctttttgttctccacttggcctgactccatttctggcattccagccatgtatttagctgttatcagctttcagatttagascaaagccttgtttccaataagcttgtttctctgaagtaattgttaaaatataattttcagaaaaaggttaaatcatgactcatacaaatataaaaatgaacatgtgctaaagatttttatttcactcatgtgatatgaagtaaccagacagaagttataaccagtacatatggaaagtcaaaaagcacaaattcatatgtagtaaaggaattggattgcaaatgaaggcaaaactgtttttyctacagggtggagggaagataatcaaaatgctagaaccagaatttscatgcctgtcacttagcttcaatttacaaaagcccagaataactcaaaggcaaattctagccctgcaaatatcagccctaaagctgtgctgtggccagtgcatagttttctattgaagtacaattttttccccaaatacattatctctcagagggagtccaaattgcttccctttcactcagcagatctgttcagtcaacagatgttaaatagctacagcgtatcaggcacaaataattctttataaaataaagtaacaaactatatgttgtttcaaagttccagttaaggccagccgtggtagctcacccttataatcccaacactgggaggccgaggcaggcggatcacttgggctaggagttccataccagcatggccaacatggtgaaaccctgctctactagaatgcaaagattagccaggtgtggtggcgcatgccggtagtccaggctactcaggtggctgaggcacaggaatggcttgagcctgggaggcggaggttgcagtgagccgagattgcgwccgctgcactccagcctgggcaacactgtgagactcctgtctacaaaaaaaaaaaaaaaaaaaactcgta

SEQ ID NO: 62 - DNA, 2199 bp, Homo sapiens
ggcacgagcttttccatcttgagcttggcagcctgtctagttgtggaagctgtggtgtggaaatcggtgaccaagaatcggacttcttatatgcgccacacctgcatagtgaatatcgctgcctcccttctggtcgccaacacctggttcattgtggtcgctgccatccaggacaatcgctacatactctgcaagacagcctgtgtggctgccaccttcttcatccacttcttctacctcagcgtcttcttctggatgctgacactggggcctcatgctgttctatcgcctggttttcattctgcatgaaacaagcaggtccactcagaaagccattgccttctgtcttggctatggctgcccacttgccatctcggtcatcacgctgggagccacccagccccgggaagtctatacgaggaagaatgtctgttggctcaactgggaggacaccaaggccctgctggctttcgccatcccagcactgatcattgtggtggtgaacataaccatcactattgtggtcatcaccaagatcctgaggccttccattggagacaagccatgcaagcaggagaagagcagcctgtttcagatcagcaagagcattggggtcctcacaccactcttgggcctcacttggggttttggtctcaccactgtgttcccagggaccaaccttgtgttccatatcatatttgccatcctcaatgtcttccagggattattcattttactctttggatgcctctgggatctgaaggtacaggaagctttgctgaataagttttcattgtcgagatggtcttcacagcactcaaagtcaacatccctgggttcatccacacctgtgttttctatgagttctccaatatcaaggagatttaacaatttgtttggtaaaacaggaacgtataatgtttccaccccagaagcaaccagctcatccctggaaaactcatccagtgcttcttcgttgctcaactaagaacaggataatccaacctacgtgacctcccggggacagtggctgtgcttttaaaaagagatgcttgcaaagcaatggggaacgtgttctcggggcaggtttccgggagcagatgccaaaaagactttttcatagagaagaggctttcttttgtaaagacagaataaaaataattgttatgtttctgtttgttccctccccctcccccttgtgtgataccacatgtgtatagtatttaagtgaaactcaagccctcaaggcccaacttctctgtctatattgtaatatagaatttcgaagagacattttcactttttacacattgggcacaaagataagctttgattaaagtagtaagtaaaaggctacctaggaaatacttcagtgaattctaagaaggaaggaaggaagaaaggaaggaaagaagggagggaaacagggagaaagggaaaaagaagaaaaagagaaagatgaaaataggaacaaataaagacaaacaacattaagggccatattgtaagatttccatgttaatgatctaatataatcactcagtgcaacattgagaatttttttttaatggctcaaaaatggaaactgaaagcaagtcatggggaatgaatactttgggcagtatcttcctcatgtcttcttagctaagaggaggaaaaaaaggctgaaaaaatagggaggaaattccttcatcagaacgacttcaagtggataacaatatttataagaaatgaatggaaggaaatatgatcctcctgagactaactttgtatgttaaggtttgaactaagtgaatgtatctgcagaggaagtattacaaagatatgtcattagatcccaagtgctgattaaatttttatagtttatcagaaaagccttatattttagtttgttccacattttgaaagcaaaaaatatatatttgatatacccttcaattgccaaatttgatatgttgcactgaagacagaccctgtcatatatttaatggcttcaagcaggtacttctctgtgcattatagaatagattttaataatcttatagcattgtatattattattgctgttgtcactgttattattattgtggatactggcccttggtgtgttgcatagctccctatgtattctctgtttccatctttaagttcccagaccaatatacattaagagttttgaaaaaaaaaaaaaaaaaaaaa

SEQ ID NO: 63 - DNA, 832 bp, Homo sapiens
  misc_feature (827)..(829): n equals a,t,g, or c
  misc_feature (831)..(831): n equals a,t,g, or c
gaattcggcacgagtatgaaactaacaacatagaatgccccccaaacaaattcctctaacctcactgagtttacttgccctattactattttttttttttaagatcttctgtctcttgtttttgttttatcccttacctgatgaaagtgaacatttctagtggagaaagaagatcacagttctctaatatgggcattaagagaggggtacagctagaggggaggtgaaaacctgcctccactggggtgaaaaacagtgtgctgaggtttcagccagtgattacactgggtaatcaaccagtcccatgtttcacaaaggagttgtaatgattaacagttcaggtatgcttytgaggaaatctaattgagacctttggaaaatagcattgttatgaatggtgtggtgttacgccctggaggggaaaaggctaggaaaaacattttaacttttcaagtgtatttaaattaacatccaaatgtttcagtgtgctttactggagactgcctgagtttggaattcaaatattgtaaccaaattactccaggtttctgaactaaaatgatctattgatgtttctcaaagtatagatcacagagtaagaaaagaggaaatcaagtctggtttatgacaaacttttttccatgttaacattggacccaaagatgttamtaagagctttttactactgtgagagraccagcgtgatgtgaagacaacgaacattttaagaagtttgactagtagacatttcgtttaagtcttttggagggtcttggttgacaacccacaattttattgtggctccccaggctgggagaacgtggaannncna

SEQ ID NO: 64 - DNA, 1336 bp, Homo sapiens
ccacgcgtccggagttccacaaaatttgttagtcatcaaataatagagtttttcttaagtgaccacttacatactcatctacaataaaccccaactaactaatttttcactttgtgtacctcatgctaatatccgtggacagtaatgtgcctgttgtgttccttttgcttttcatccttgtgatcttatgtcacatggaatgtaaaggccacatatatatatgtgtgtgtgtgtgtgtgtatatgtatatttttaagaatatttagtctggatttcatgaaattgacttctgaaataatttgcctcaattttgtttcctggtggtttgagaagaaagttcctgtggtgaaatgaaaaggggataaagggaagtacttattttaaaacataagtaacttgtggattgttgaatactggaaaaagagtgttacttccccgttaacctacgcctcgtgtaatccttcaggttggaagtcggatcgcagaccgtgtatatgacatacccagaaatttcccccttgctttggatcttggttgtggaagaggttacattgcacaatatttgaataagcttcagttattccattgcaggaaactattggaaagtttttccaagctgacattgcagaaaatgctttgtttgcattgggtgaatgaccttcctagagcacttgagcagattcattatattttaaaaccagatggagtgtttatcggtgcaatgtttggaggcgacacactctatgaacttcggtgttccttacagttagcggaaacggaaagggaaggaggattttctccacacatttctcctttcactgctgtcaatgacctgggacatctgcttgggagagctggctttaatactctgactgtggacactgatgaaattcaagttaactatcctggaatgtttgaattgatggaagatttacaagaacaaaagtccagaatgttgacctaattttacaaaacaagctgcatatcagctgatgaatgcatgagaaattttcaaggctttcacagtggtcttaaggtatgggtgagagtaactgtgcttggaatagaaaagccctgctgcatcgagacacaatgctggcagctgcggcagtgtacagagaaatgtacagaaatgaagatggttcagtacctgctacataccagatctattacatgataggatggaaatatcatgagtcacaggcaagaccagctgaaagaggttccgcaactgtgtcatttggagagctaggaaaaataaacaaccttatgccaccggggaaaaaatcacaataaatatttattcagtgttaaaaaaaaaaaaaaaaaaaaaaaa

SEQ ID NO: 65 - DNA, 799 bp, Homo sapiens
ggagacggtgggtgaccagagagtcctgtctatcctaggaggagaacattcagcccaaatcccagccccatcatgcacagatcagagccatttctgaaaatgtcgctgctgattctgcttttcctgggattggcagaagcctgtactcctcgtgaagtcaacttgctgaaagggatcataggtctcatgagcagactgtcaccggatgagatcctaggcttgctgagcctccaagtactgcatgaagaaacaagtggctgcaaggaggaagttaaacccttctcaggcaccaccccatccaggaaaccactccccaagaggaagaacacgtggaacttcctgaaatgcgcctacatggtgatgacctacctcttcgtatcctacaacaaaggggactggttcactttttcctcccaagtgttactgccactactgtaacttggaactggacatcagggatgatccctgctgttctttctagtgagcctgctccatctcagcttagccttcacaaggcctccatctcccaggcattctaacctctgaagaaagctctctgtcccctggactgcctgtgtggagggtaatgaactgggtcctttaaggaatggcacctgggtgcccagaggcatggccagaaggtgtctgtgggggccatgccttagggggatgcacccagggcggctgagagagcaactgcaggagtttcccctaaaatctctcctccagatcgttctcgaactttccccactacttccataataaaatgtatacttgttgaaaaaaaaaaaaaaaaaaa

SEQ ID NO: 66 - DNA, 1347 bp, Homo sapiens
  misc_feature (83)..(83): n equals a,t,g, or c
  misc_feature (334)..(334): n equals a,t,g, or c
gggcagccctcaggccctccggcagcctggccgggcccgagtggccatggcagcactggtgtggctgctggcgggagcacatngtcaagcctcaacaagtggatcttcacagtgcacggctttgggcggcccctgctgctgtcggccctgcacatgctggtggcagccctggcatgccaccggggggcacggcgccccatgccaggcggcactcgctgccgagtcctactgctcagtctcacctttggcacgtccatggcctgcggcaacgtgggcctaaggctgtgcccctggacctggcacaactggttactaccaccacacctctgttcancctggccctgtcggcgctgctgctgggccgccgccaccacccacttcagttggccgccatgggtccgctctgcctgggggccgcctgcagcctggctggagagttccggacaccccctaccggctgtggcttcctgctcgcagccacctgcctccgcggactcaagtcggttcagcaaagtgccctgctgcaggaggagaggctggacgcggtgaccctgctttacgccacctcgctgcccagcttctgcctgctggcgggtgcagccctggtgctggaggctggcgttgccccaccgcccactgctggcgactctcgcctctgggcctgcatcctgctcagctgcctcctgtctgttctctataacctggccagcttctccctgctggccctcacctctgccctcaccgtccacgtcctgggcaacctcaccgtggtgggcaacctcatcctgtcccggctgttgtttggcagccgcctcagtgccctcagctacgtgggcatcgcactcactctttcaggaatgttcctttaccacaactgcgarttcgtggcctcctgggctgcccgtcgggggctgtggcggagggaccagcccagcaagggtctttgagacctgggggatctcaggagccacctgggatggccctggcctgaatccagcctccgctgtggccatagaaggaatggagaacagggctgggcatggtsgctcacgcctataatcccagcacttccagagtccgaggtgggtggatcacctgaggccaggagttcgagaccagcctggctagcatggcaaaacctcatctctactaaaaatagaaaaattagctgggcatggtggcgcgtgcctatagtcccagctacatgggaggctgaggtgggaggatcacttgagccctggagatcgaggctgcagtaagccaagatcgcatgctactgcactccagcctgggagacagagcgagacgctgtctcaattaaaaaaaaaaaaaaaaaccggcacgtag

SEQ ID NO: 67 - DNA, 642 bp, Homo sapiens
  misc_feature (41)..(41): n equals a,t,g, or c
  misc_feature (49)..(49): n equals a,t,g, or c
  misc_feature (64)..(64): n equals a,t,g, or c
  misc_feature (607)..(607): n equals a,t,g, or c
  misc_feature (621)..(621): n equals a,t,g, or c
taaaggggaaacaaaaaggctgggaaggcttccaaccgcgntttgcggnccggcttctaggaantagtggaatcccccgggctggcaggaattcggcacgagaaaatgacttcagacaaatatgatcaatctctacagtcccctgatgaatttcacaggttcccaccaccatcagttctacctattcatctcatccatgctcattgttctgcctctttcctgttcctatggatgccctggcatgtttgtttctttctttctggcctcctatttccctcccctcagacatcacttcagcatctgtgccttctcacttcccttatcctgggtgttaccatttcagcctatgagcatgccattaatttgccatctttacaaaattctctcttgacttcacatccctctgtagctgccctctcccttctctcctcttctttacaacaaaactccttaaaagaactgttggctgggcacagtggttcactcctataatcccagcactttcagaagccaaggtgggaacatcacttgaggccaagaggtcgagaccagcccaggcaacacagtgagacctcatcactacaaaaaaaaaaaaaaaaaactcgangggggggccggtanccaattggcctaaagtgagtc

SEQ ID NO: 68 - DNA, 802 bp, Homo sapiens
  misc_feature (105)..(105): n equals a,t,g, or c
  misc_feature (730)..(730): n equals a,t,g, or c
  misc_feature (755)..(755): n equals a,t,g, or c
  misc_feature (757)..(757): n equals a,t,g, or c
  misc_feature (777)..(777): n equals a,t,g, or c
cgtgcctgtagtaagctcatccctgcctttgagatggtgatgcgtgccaaggacaatgtttaccacctggactgctttgcatgtcagctttgtaatcagagattntgtgttggagacaaatttttcctaaagaataacwtgaycctttgccaracggactacgaggaaggtttaatgaaagaaggttatgcaccccmggttcgctgatctatcaacatcaccccattaagaatacaaagcactacattcttttatcttttttgctccacatgtacataagaattgacacaggaacctactgaatagcgtagatataggaaggcaggatggttatatggaataaaaggcggactgcatctgtatgtagtgaaattgccccagttcagagttgaatgtttattattaaagaaaaaagtaatgtacatatggctggatttttttgcttgctattcgtttttgtgtcacttggcatgagatgtttattttggactattgtatataatgtattgtaatatttgaagcacaaatgtaatacagttttattgtgttaccatttgtgttccatttgctyctttgtattgttgcatttagtacaatcagtgtttaaacttactgtatatttatgctttctgtatttaccagctattttaaatgagctgtaactttctagtaaagaattgaaaagcaaatcctcactaaaggatacacaggataggataaagccaagtcncatcaacattaaaaaatactaaaananaaaacacaaaaaaaaaaaancccggggggggcccggaacccattc

SEQ ID NO: 69 - DNA, 470 bp, Homo sapiens
ggcacgagggaaatcttgcacataggcaggtaaataattataaatggtgaagtggattattctgagctgcttaattttaaagggaaagagaactttaaactcttcaaccttttatgctgctaataagagttccacaatcaatagaaatctatcttggcaggcacttccttttacccactagaattttttcccttgggagttcacgatccccagaaactgtgatatgagccattcaatattgatgtactaaaacagtgctctgcttaaatacagtttttcaacatacagtcttggaagaaacaaaatccaaaataaattccaatagtccagtaacaggaataaagacaactattgcaaattaaatcttacagacttatatgaaagctgttgttaacagctgggtactagttatttgaaaagtttctcgtgccgaattcgatatcaagcttatcgataccgtcgacctcgta

SEQ ID NO: 70 - DNA, 1881 bp, Homo sapiens
  misc_feature (70)..(70): n equals a,t,g, or c
  misc_feature (126)..(126): n equals a,t,g, or c
  misc_feature (1860)..(1860): n equals a,t,g, or c
atttttccttttccttaacaatacctttggccatttttttccagttcactatgtttgtatactaactttncttcagccttttaatgcgaagcaactagtagagcatgctttcaggatctgacagcnctgctagtagagcgaagtatttattaatacagaattaaccttmgcccctttaaagtcaagtctgtctaatctaactagcgcctcgctttgccttctcacaatgctcactagccatcatgctcacccttctcttccagatccacttcctcatgatactgtcttctaactgggcttacttaaaggatgcgagcaaaatgcaggcttaccaggatatcaaagcaaaggaagaacaggaactgcaagatatccagtctcggtcaaaagaacaactcaattcttacacataaatgtttgccagagtgtttcggccgacgtatttacagctctgacaaatcatcagacagctgctctgcagtacagatgtgtatcccaccaaactaatgtagatgtacaaacacttcactgtctgtctcaagctgctgggatgtatctctaggaaaaccttccagtgggtaaatctttttctttagaacaaatattggaggtttcatgttagccattttaaaaggcaacactttgacaaaatgatcgttcatactttgggaatttgtggcatgttcacatttattgctagggcaattctaccaagacactcaatggaatatgtcacactccttaatagggacctgtgactccttaataaggacctgtgacatgcccagcatcaagggataagaccgtaaattcacatatatgccatctgtcctcaagtgttatctacataggaaataaaatggaattgatgtaaagttccatttctgacagctgacatttattaaactttggatcaaagataatgtgattcttatgattgatttctcaaactagcttttccctcccaagtccaggacccattaatttcctgagccaatcagaaatatatttttcaataatgctaaaattagctacaattctgctgaccctactattaaagaatctggatgctggactcactgacaagctttccagaagcaattttataacagatttcattttaacaaaatactgatccaattttcattattcttgagaaatgtcagctttgccttaatgagtatttgctttaaatttctaagaatttatatcataactagagacccaaatatctttcacagaattttgttccataaatgtttttcttaattattaagaagtgttaccttattaaaatgaccaccattctaaaccatttttcagtggtctggatacgaagtttacagtttcataccaactatctaaaacctaattgcaaattgaccacagacctctaacctcctacttttatagacttgaatacttaagtaatttaaattagggttggtatttcatttttttcttatctaaatcttagtttcctggaataataaagtttgatgttcagcaagagaactgcttgagtttaagccattttcaaaagaaacttgccttttacattattgtgttccagaacattaagtgactgtaggtactgggtattagtgatggtaaactttgtgttgctctttatgaaatgatccatataactgttgggtgcatcagtgcttttcaaaggggctgcttactatagggttaactatgtatattcattgttaagagttaacttgtggtttggctgttycctggattttataacatacatgtgcagaaatgtattcaaatgaaaggaagcatacctttatcaagatgctattaaaattgaacatcaagtataaaaaaaaaaaaaaaaaaaaattnctgcggccgacaagggaattc

SEQ ID NO: 71 - DNA, 541 bp, Homo sapiens
tgcaggtaaccgttccggaattcccgggttcgacccaaggggtcccgtgatgccttgtcatggtcttcttgcacagggcctcagcctggcacctctgccaccgtgggctctctgttgtgtgggggtgtcccgtgcattgcaggacatccagcagcatccccggcctcctgctccgtgccagtagcgccgcaccccgccgtcgtgacagcccaggtctcccggtgtgcagaatgcccgctggtcatgctgagaggtacaggggtgctgcccccagggtttgaacgctgtctaactcccacctctggtgtgtctctcccctgtgtgtagcgtggagtcactggatgagtgtggtgacctccctgtgtccagctgccctgggctgcaagcaggtccctcctgcagccctccaggccacccttaagcagagctggaccagcctggccaacatggtgaaaccccatctctactaaaaatacaaaaattagccaagcgtggtggaactctgtctcaaaaaaaaaaaaaaaaaaaaaaaagggcggcc

SEQ ID NO: 72 - DNA, 762 bp, Homo sapiens
ggcacgagtgcctctacgtcatgtcttctccaatgtcatgattcacgtcgtgcagtactgttttggacttgtctattatgtccttgttggcctaactgtgctgagccaagtgccaatggatggcaggaatgcctacataacagggaaaaatctattgatgcaagcacggtggttccatattcttgggatgatgatgttcatctggtcatctgcccatcagtataagtgcccatgttattcgcggcaatctcaggaaaaataaagcaggagtggtcattcactgtaaccacaggatcccatttggagactggtttgaatatgtttcttcccctaactacttagcagagctgatgatctacgtttccatggccgtcacctttgggttccacaacttaacttggtggctagtggtgacaaatgtcttctttaatcaggccctgtctgcctttctcagccaccaattctacaaaagcaaatttgtctcttacccgaagcataggaaagctttcctaccatttttgttttaagttaacctcagtcatgaagaatgcaaaccaggtgatggtttcaatgcctaaggacagtgaagtctggagcccaaagtacagtttcagcaaagctgtttgaaactctccattccatttctataccccacaagttttcactgaatgagcatggcagtgccactcaagaaaatgaatctccaaagtatcttcaaagaataaatactaatggcagaaaaaaaaaaaaaaaaaaaaaaaa

SEQ ID NO: 73 - DNA, 1103 bp, Homo sapiens
gtcttaatgagcaacagcaacagcagtctccagttaagaaagagagaattaaatacagcagagatttcctgttgaagctctcaagtgtttccatctgcagaaaaaaaccagactttctgcctgatcatcccattgtactgcaaaaaccagaaaacaaccaaagttttaagtagcattttaagaacagatgaatttaagtttggacatctgcaaatgaggtggatctagcaacaataactgtaatggactgtgacaattcaatttattcttaattttgatggttggctatttgacttctctaaaaatgagaaagagctattttaaaatataaagaattttctaatcagtttcagctttgcaggaggtttcctgcataaattgggaagtaacactggaaagtaggaatttggttagtgaagtgggaagactgtatatttataatttgcatactacttgcaattttttgtttttcatcacttgtaataatggaatggaaatgtaagctgtaaagactctcaaatataaaatatttgctacagtgtatatatggtacataattgcttgttgcttttaaagttccttctgttgttctgcttcccactgatttcataccagctcatgaatggatcattacagtctctccagaggcttagaatgattcagaatgttcaatgcatagttctcaataaacaggaggcagaatttttaatgggtatttcttttcagatatatgattggtctctaggtttttgataataatatggtcttaaattcataattactagcagagattgataatttggaaacaatggtagtgaatgaaactgaagttgaaaaacggctgctacttatgtcactaatcagaccatatgaatagcagaagttgagcaatttcaaagtaaaactgatatttttatttccaaaggaatttagacatttgaaaataattgacatacattaagttttaattcgataatttcttatatatggatgaacaatttttgggtttaagcttttaattcctagaaattttatacattaaatctcctgcaatttgtcactctggatgttactgtttaaaaaaaaaaaaaaaaaactcgtag

SEQ ID NO: 74 - DNA, 1633 bp, Homo sapiens
ggcacgagcatcagtaagtaggagctagggaagagaaagcatgcaaaagggcaagaatcaggagaattgatatagtagctggacagaactctagatgtgtgtgtgtgagagaaagagaggcagggagaaggagggaggagttacccccacgatgacctccaacttccctttctgcaccctcatcctggggatagcacaggctcaggcctgccctggttgccctggcgattggcctggcctgggctcaggggtgggggaggggctgcaccacattaggacctgccgtactccaatcccatgcagtcctcctgctcctgctgctgcgtgcctgggctctggtcatgccaggcttccttgtgtcctgcgtctgtggccggttcctgccaacctgtctagtcctttcaggcttgaggccctgcattgctctttctggtcctctcccctccttcccgctccccatctagccttttttgggttccgggatctgctgacagactttcttcttgctgcctgcctgcttacatttcagaagacccctctggaactgcccatggctgtggtccacctgctggtagcaacgccctgttaccaaatgctagataatctgccactcccctctgcagccgccaactggtgctgagctgccacctgttgtctgtttccacacccttgtacactgcattctgcctgtcactctggacagctgcccagcagctgcagctgaggccgtcctgccagcacctaccgcagccccatgggtggtcctgtccagttcctggcgctcccagcctgcctcatctgctgtacttacagagccacatctggttgaatacagagctggggtagcctggatgggcccatggcacactcactcccagagaggcgggcatcctctctctggacctctagggaagggcagggtctggagcccaataataaaacacagtaatgataatcatagctaatgtttactgagaacttaggatgtgataggctcaatgatttaccagaattactctatactgcataactaccctatcaggtaagtactattaatatcccctttcccacatgaagaaactaaggctaaccaatagaaatgaacctgtgtaatgtcccatgggcataattcatggagccaggattcagaaccaggtgctttacttcagggctgaagctcataaccactagaccaaagcgcctcctccgtgacctctggggaaggcccagcaacatcctctattgcgtccaatgacttctccctggtctgagatccactgactcacaggggtagggttaaggttaaggccagagtctcagctaagctttggatactttcttctggatttggagaaggctggaataactgaatttctgctcatcttcaggagcggcctactagagccacacatttcccagctctccttgtgtgtttcccagacccttcttccatcgtgtcctctcccttaggctcctggaaagttttcagagagaatcacccagtggtaacattgttaaacaaaacaggaaaatgggacttgtgtgtatatatgattaaattattaattgatggatctaccttcttagctcgtgccgaattcgatatcaagcttatcgataccgtcgacctcga

SEQ ID NO: 75 - DNA, 1384 bp, Homo sapiens
ggcacgagcagttattttcaaaatggctatggaaaacacgtaagttttaaaatatgccctctttctcgttttaaaaaattattactattgtccatacatgttactcttttcatctagatttatcatgtttctttggcctccagtctctggtgtttgcctaagctttattagagacaggtcatttctacctatgtgtcattttatctatgtcttgatcttatgtaattcaattgctctttaagattatgttctcttctcatgtttggtttatccattatccaaattttccatttctttaacctgttatcccttgactctttacagttctacctttttattcacttagtcttttaccctttttttattcgttcacccctttttgttgtttcaggtactccttacttatctccttagccttttcttcttcatcttctttcttacttttctcctacttctcattttacataatacttactttttgcttcagtcttcaaccattgtcaatcttgtttttccttatattccattttactttctgaactactctttaatctcctgttcaacactacctttccttcttttttatcccctcttatttacacggtgattacaacagtttggtatagtctgatttatctgattgtaaaattgatgagttggatgtaccaaaaatataaggaagctaaattcaaagaaggtaaaagatttgcttgtgtcacctagctggttaattttggcatatgcattgtttctctacatagtctatgtagtcaaacaggtttcatttagaaatcattccccataagaagggtttcaatttgatttgaacaggcagagatggaaaaaatttcctctctgataactactgctactgttgtataccagtagaaatataacagcagcacttaggttagaagaagctcattagctattcagaataaatttcatttttcttaatttttggtaatcatatctcagcctgttgaatttaacttaaactctgaaagaattttggttgccatttaatttttaggtttccttaatgatagggacctaataatttgttttaaaaaatttgtcttggctgggagcagtggctcatgcctgtaatcccagcactttaggaagccaacattggaggattgcatgagcccaggatttcgagaccagcctgggcaacacagtgaaacctcatctctacaaaaagttaaaaaattaaccaactgtggtgccacatgcctgtagtcccagctgcttgggaggatgaggtgagaggatttcttgagtccaggagtttgaggctgcagtgagctatgatcacactcctgctcttcagcctaggtgacacagcaggacactatctttgaaaaaaaaaaaaaaaaaa

SEQ ID NO: 76 - DNA, 1715 bp, Homo sapiens
ggcacgagggacattggagctccccacaccactcattgctgcccaccagctatacaactacgtggctgatcacgccagctcttaccacatgaagccattgcgaatggcccggccagggggcccagaacacaacgagtatgccctggtgtcggcatggcacagttctggctcctacctggactctgagggacttcgacaccaggatgactttgatgtgtctctgcttgtctgtcactgtgctgcaccctttgaggagcaaggagaggctgagcggcacgttctgcggctacagttcttcgtggtgctcaccagccagcgagagctcttccccaggctcactgctgacatgcgccgcttccggaagccacccagactgccccctgagccagaggctcctgggagttcagctggcagccctggggaggcctcagggcttattctagcgcctggaccggctcctctgttcccaccactggctgcagaggtgggcatggcacgagcacggctggctcagctggtgcggctggctggagggcactgccgtcgggacaccctttggaagcgcctcttcttgctggagccaccggggcctgatcgactgcggctaggggggcgcctggccctggcagagctggaggaactcctagaagcagtccatgccaaatccattggggacatcgacccccagctggactgcttcctatccatgacggtctcctggtaccagagcctgatcaaagttctcctaagccgcttccccagagctgtcgccatttccaaagcccagacttgggaactcagtacctggttgcgctgaatcagaagttcactgactgctctgcgctagtgttctggactccacttaggaaagacgtctctgaagtggttttccgagaagcccttccagtacagccccaggacacgagaagcccccctgcccaactggtctccacctaccaccacctggagtctgtcatcaacacagcctgtttcacccttctggacccgcctcctctgaagggagtggactggaccactgaatgtcactgttccttgaatcatgggcctaccagattgcctgccagaggcaggactgaccagcccttctgggccccagggcaagccagacactgagtgacaccaaaggctttgtaactatgtcttgagggtctgctgccccagcctggcagcaggaaccgccctccccaaacacccacagccactgacccatccaggactccagagagtcaggtcaaccccgaggaccccttgggcccttctggggtactcctttcggcccccctggtagagtctcgggagttcacacagggtggcaaacaccccctagagctcctctgcctgaatcctgccccctagcctttgaccactgtcagccacctgtgtcccttgagccttcgggtcttcacttcccacttggacatcactgctggacattcccatcgagatgacacctgggttccaatcccagctctgcctttgaagcacttgcggccaccgtcaagtccctttgctctcggaccctgggtttctcatcctttaatgaggtgggttcagaagctctcccatcttcacagcaaccctggcactggcttctcaatgggagggaagtcagcagagaaactgaagtgttagacactatgtgtcccaccaccccattacagagacatatgacaatgaaaaaaaaaaaaaaaaaa

SEQ ID NO: 77 - DNA, 1437 bp, Homo sapiens
cgcccgacgccggaactgcgagctctcagcgggagccgagacggtgcagggccggagaagcaccttcactcccagcctgcgccccgatgctgcgcgttctgtgcctcctgcgcccctggaggccccttcgggcccgcggctgcgcttccgacggggcggccgggggctcagagatccaagtgcgcgccctggcgggtccggaccaagggatcactgagattctgatgaacagaccttctgcccgcaatgccttggggaatgtcttcgtcagtgagctgctggaaactctggcccagctgcgggaggaccggcaagtgcgtgtcctgctcttcagaagtggagtgaagggcgtgttctgtgcaggtgcagacctgaaggagcgggaacagatgagtgaagcagaggtgggggtgtttgtccagcgactccggggcctgatgaatgacatcgcagccttccctgcacccaccattgcggctatggatgggtttgccttgggcggaggcctagagcttgccctggcctgtgacctccgagtggcagcttcctcggcagtcatgggactgattgagaccacgcgagggctcctcccgggggcaggagggactcaraggctgccccgttgtctgggggtggccctggcgaaggagctcatcttcacgggccgacgactgagtggaactgaggcccacgtactggggctggtgaatcacgctgtggcccagaacgaggagggggacgccgcctaccagcgggcacgagcactggcccaggagatcctgccccaggcccccattgccgtgcggctgggcaaagtagccattgaccgaggaacggaggtggacattgcatctgggatggccattgaagggatgtgctatgcccagaatattccaacccgggaccggctagagggcatggcagccttcagggagaagcggactcccaaatttgttggcaaatgacccccattttaaccttcagcatgggagatgcatgccctgaagagcaggatccagaaggaagatttgtggccagattgccttcatcatttcacctctccagacttccatttcttcacaaggatgatgatggaaataaaatgactggcgtgatgcctggaaccaaggtgctgatcctaccacctactgctaccttccttagcttcaccctggctagaaataatcacgagggttgggtttgctttggaaaatgcctgtctctctacttgaatgataaagaattaaattagatctctctgagtcttggtatcattggctctcagcccctgacctctctcagttatcaggcactcattagagatgtcagaagattttaagatacccctagtttcttcctgtggaacaacagaggtaataaataaactctggacatcggttgaaccagtgtcaggggtcagactgcagatcccagtct

SEQ ID NO: 78 - DNA, 776 bp, Homo sapiens
ggcacgagctgatttctatttttaggagctacttggatttgtatgtattttttctacgtgaaaatatatgtactcttcacttttgttccagtactataattgctcatgcactctttctcccctttgagaacattcagtgaaatacaacttcatcaaagatttgctcaaaggagaagaatcgcatgagtgtgaaaagtagatgctcgtagccagaacagaaaaggttacacatgatcatggcacagaagataggaggtttgacttggtgggccataatgtttattatcctttttgaaataacagggaccagcagcagttttctcaggataaatgctctaccccacttctctatgaacaggtgtggggaggcttactttccattttcatatttatacacctctctacaaaagcaatttttaatgaaggttagtggaattgttaaaaatctgagagggaatgatgactggaggtgttttggggtttttttctgtattcattttttaatgagaaaagttttaaatgtagtacaggttagacccaactactaccttactattataggacgattctatgtttctgttaaagtattcaagtagctttctctgggggaaaaagtaccacttggacacttaaaggaattgggatttttgtctactttggataaggcagttgacttcttaagtaaaagcaatagtgtaaaatgtcattttgtttggaatgttaagtgagcaaataaaaaacatgttgaaattgtaaaaaaaaaaaaaaaaaaaaaa

SEQ ID NO: 79 - DNA, 1155 bp, Homo sapiens
ccgggtcgacccacgcgtccggtgagtgcactctaggatgttcacatgatgacaaaatcacctaacaatgtagacgcttcagaacatataccctttgttaatcgatgcatcactgtatatatgtgtgtatatacacacatatatgtacatatatttaatacatttgtgtatgtgtgtgtatatatatatatatatacttctcattatttatactctagacccagagcctcctagctggtctccaaaattggactctcatctctctttgagacagccttcaaatgatcgtttttaaagtgctaattaactcctcttctcaaaatgcttcaatggcccactaatctctaccgaatcaaggaattcagccatactgtcccaagatatctttccttggccagttggagcctcatttcagctgctctgggtttatcccctgtctcttctttcccacttccaagcctgtgctcagcccacctcctcttctggggatgccccacaccccactctgccatatctgccaaacctttcatctccccgtgaagctcttgacaccaaatacagtttactttagaaaatgtattttttccactttctcaactaaacttttccttgtgtgatctgcttttccgctgccaaggcacatcgtttttaattctctacagcactgctcatatcttgcccagtattatagcttctacatattggtcttgcttcttatttttgagcacaaaaactaagccactccactttctcttaccagtgaatccagcttaaaaaaactgtgagcaacctatcagtattttgttgacatgaactctatagaaaccttagtccctggatcttcgactctgcctcccctgacatttatctgctcccacaaagcacgcaggtgtgggaagagaagtggctgttttttgaggtcacatttcagccctgattcatcctaatgtcttcaccctttttatcctttggscactgtgtycctagagatgtgaattcaattccgcaccattctctcctttacaatgatgccaatattctcaggcttttaagactaaattttaaattacgagaaaatttgatcttcaaacttaagttggacctagaaagaacaatctcatgaactcaaaaaaaaaaaaaaaaaaaaaaaaaaaa

SEQ ID NO: 80 - DNA, 407 bp, Homo sapiens
  misc_feature (352)..(352): n equals a,t,g, or c
  misc_feature (376)..(376): n equals a,t,g, or c
  misc_feature (378)..(378): n equals a,t,g, or c
ctttctgggtttagggaagtggtggacaaggcaggagagaaccacattcatcttctcctcttgtgtttgtcttctgtctttcaataacgtccatgaactgtgaggttagtgtcttggctgagagataagtawggctkggcatkgattcttytgtkgtwacctcaagctgttttctagtccccaagaacagcaytytcagtgggtgtggaagtgggcgggacatgaagcaatggttttacattgcattgcctggctacagsttggcatttctttcctttttctttttctttgcgtcattgccattggtgccactaattttgcttcccctytcttttataaacttgtttcctcnggagttgcctaagagtcctgcatnanaacctaattgggaatgaagcagtgtgttc

SEQ ID NO: 81 - DNA, 711 bp, Homo sapiens
ggcacgagcgaagaccctgttcggaccctgccccgattccagactcaggtagatcgtcggcataccctctaccgtggacaccaggcagccctggggctgatggagagagatcaggtatcccccagggagtaggggctaccttgaggggatgatagacctcccccactcccagtgkkactctggaaatatgaaggaactagggagtggaagagatttcagagctggggagaggagttcctcccttcaaagccagcaactgcctttggggaatgtcggggggtctctcctttctcctgcttgtgtkargtggtacacagtccccccttcacctggcgggaagctgtcccggacagactcatctcagctttcccttggggcaggatcgggggcagcagctccagcagaaacagcaggatctggagcaggaaggcctcgaggccacacaggggctgctggccggcgagtgggccccacccctctggragctgggcagcctcttccaggccttcgtgaagagggagagccaggcttatgcgtaagcttcatagcttctgctggcctggggtggacccaggacccctggggcctgggtgccctgagtggtggtaaagtggagcaatcccttcacgctccttggccatgttctgagcggccagcttggcctttgccttaataaatgtgctttattttcaaaaaaaaaaaaaaaaaact

SEQ ID NO: 82 - DNA, 2152 bp, Homo sapiens
ccgctttgttctccagatgtgaatagctccactataccagcctcgtcttccttccgggggacaacgtgggtcagggcacagagagatatttaatgtcaccctcttggggctttcatgggactccctctgccacattttttggaggttgggaaagttgctagaggcttcagaactccagcctaatggatcccaaactcgggagaatggctgcgtccctgctggctgtgctgctgctgctgctgctggagcgcggcatgttctcctcaccctccccgcccccggcgctgttagagaaagtcttccagtacattgacctccatcaggatgaatttgtgcagacgctgaaggagtgggtggccatcgagagcgactctgtccagcctgtgcctcgcttcagacaagagctcttcagaatgatggccgtggctgcggacacgctgcagcgcctgggggcccgtgtggcctcggtggacatgggtcctcagcagctgcccgatggtcagagtcttccaatacctcccgtcatcctggccgaactggggagcgatcccacgaaaggcaccgtgtgcttctacggccacttggacgtgcagcctgctgaccggggcgatgggtggctcacggacccctatgtgctgacggaggtagacgggaaactttatggacgaggagcgaccgacaacaaaggccctgtcttggcttggatcaatgctgtgagcgccttcagagccctggagcaagatcttcctgtgaatatcaaattcatcattgaggggatggaagaggctggctctgttgccctggaggaacttgtggaaaaagaaaaggaccgattcttctctggtgtggactacattgtaatttcagataacctgtggatcagccaaaggaagccagcaatcacttatggaacccgggggaacagctacttcatggtggaggtgaaatgcagagaccaggattttcactcaggaacctttggtggcatccttcatgaaccaatggctgatctggttgctcttctcggtagcctggtagactcgtctggtcatatcctggtccctggaatctatgatgaagtggttcctcttacagaagaggaaataaatacatacaaagccatccatctagacctagaagaataccggaatagcagccgggttgagaaatttctgttcgatactaaggaggagattctaatgcacctctggaggtacccatctctttctattcatgggatcgagggcgcgtttgatgagcctggaactaaaacagtcatacctggccgagttataggaaaattttcaatccgtctagtccctcacatgaatgtgtctgcggtggaaaaacaggtgacacgacatcttgaagatgtgttctccaaaagaaatagttccaacaagatggttgtttccatgactctaggactacacccgtggattgcaaatattgatgacacccagtatctcgcagcaaaaagagcgatcagaacagtgtttggaacagaaccagatatgatccgggatggatccaccattccaattgccaaaatgttccaggagatcgtccacaagagcgtggtgctaattccgctgggagctgttgatgatggagaacattcgcagaatgagaaaatcaacaggtggaactacatagagggaaccaaattatttgctgcctttttcttagagatggcccagctccattaatcacaagaaccttctagtctgatctgatccactgacagattcacctcccccacatccctagacagggatggaatgtaaatatccagagaatttgggtctagtatagtacattttcccttccatttaaaatgtcttgggatatctggatcagtaataaaatatttcaaaggcacagatgttggaaatggtttaaggtcccccactgcacaccttcctcaagtcatagctgcttgcagcaacttgatttccccaagtcctgtgcaatagccccaggattggattccttccaaccttttagcatatctccaaccttgcaatttgattggcataatcactccggtttgctttctaggtcctcaagtgctcgtgacacataatcattccatccaatgatcgcctttgctttaccaytctttccttttatcttattaataaaaatgttg

SEQ ID NO: 83 - DNA, 1555 bp, Homo sapiens
  misc_feature (1248)..(1248): n equals a,t,g, or c
  misc_feature (1389)..(1389): n equals a,t,g, or c
  misc_feature (1391)..(1391): n equals a,t,g, or c
  misc_feature (1393)..(1393): n equals a,t,g, or c
  misc_feature (1396)..(1396): n equals a,t,g, or c
  misc_feature (1551)..(1551): n equals a,t,g, or c
ggcacgagctgggcagatgcaaaatctggagagcgcgagggccgggcggtcagtcagcacccagactggcagcatgaccggtcagataccaaggctttctaaagtcaaccttttcactctgctcagcctctggatggagctctttccagcagaagcccagcggcaaaaatctcagaaaaatgaagagggaaagcatggacccttaggagataatgaagagaggaccagagtatctactgacaaaagacaggattactgggagcagctaagatgcctaratgaaaggtttaccatcactgctggttaggaaatggattatgagaactcgaacagagggaaggtgaaatgcaaccggaggaaacactctgatatgaggtttgaggccttcaaaattgctttgcagcataagccacagtgagtcaggagtaccagggagtggatagaatgtttatttgtttaactgagactttttagttcatcaattattttgaagggtagaacactctgtgggctctctttctatttccttctgggtacaatcacaaaaaaaaaatctctcctagctgaaattacatgcagtactagcaaagggtctctttgttataaactgttcattaattgacgaacatttgtgtacttaactatgtataaggcatctcatcgttcaatttcaaatacaaattaaaatattttttcacatttgttatcctgttatgttttctcttttacaaattgtctgttcgtatctttttgtctctctttaggccttattcttgtcaattcatatgtgctctaatgaattgaaatattttctgtatattaaacattactaacctttcctctgtcacactgattgaaaaatgatctatttagtttgttgttttgtctttaattttgtaagctttaaaaagttaatattgcccttcagacaccatcccaacatcacataagaattttttcatgttataaattctttgtggacatatttgataactgttttattatgaggaggaccataattaattcaaccattcccctattttggtcatttaggtttttgggtttgggttttttgtttgtttaacgtctttgcttgctattttaaagaatgctgcactaaatgtgaatgcttgagatttcttctctgtatttagaatattttcctagaatggattctcagaagaattctcagtctgtggagaggaacatttttaatgcatggaagagctggagtgaaccgaatttcanactgccctgctgatccagaaataagtttgcttacggaggcttctagttctgaagatgcaaagttagatgccaaagcagtggaaagattgaagtcaaacagtcgggcccatgtgtgtgtcttacttcaacctttggtgtgtnananggngcagtttgtagaggagacctcttacaaatgtgactttattcaaaaaattacaaaaacattgccggatgctaacactgacttttattatgaatgtaaacaagaaagaataaaagaatatgaaatgttaaaaaaaaaaaaaaaaaaaaaaaaaaaanaaaa

SEQ ID NO: 84 - DNA, 1532 bp, Homo sapiens
  misc_feature (1412)..(1412): n equals a,t,g, or c
  misc_feature (1433)..(1433): n equals a,t,g, or c
  misc_feature (1446)..(1446): n equals a,t,g, or c
  misc_feature (1505)..(1505): n equals a,t,g, or c
gctggagcggtttcattgcctacattccgcattggaaaatagaagcaggcacaatgaagggaaaaggccgaggcatcagcgtgtgaagaccgcaaagacgatcccgagtacagttgtgaacagcattgctgctaggctcctcctgcagatcatctgaaatgaacctctcttattgatttttattggcctagagccaggagtactgcattcagttgactttcagggtaaaaagaaaacagtcctggttgttgtcatcataaacatatggaccagtgtgatggtgaaatgagatgaggctccgcaatggaactgtagccactgctttagcatttatcacttccttccttactttgtcttggtatactacatggcaaaatgggaaaggtaaggaaaatgactcggaaaatgtgcatgaaatgtactagggtttttgcttggttaaggtgcctaaatgcttaggtcaaataccctggcaatctgcatgttacatgctatctgctggcagtttctttctgatataaaaatgaaacagtattcttggacagaggacacagaatttctaattccagtggggcttgttttgctttcagtttcttataattgtacttggagaaacagatactgatcagtgttttatattctaaaagacagccaagttgaataataaagactttcgttttggcattttgttctttttactaaacataattaagtgtttaataagcttccttgtaccgagtgttgcataaaacacttaaaaggacacaattagtgccttcgtgagatttacatgctaattatgctaaygattgggtgctatgtagttaatgatttaaactgcatgcattgacagattactccttaggcaaaagtatttaagaagggataagtagaaattctgattggaatattaaaacattttttaaaaattaattatgkttagactgktgaaccgkgttatataattttaggataawggattwatttgctttttttttttttaagagaaactacttgaagtaaattcctacccatacttcttacttgtctcctttcctttgattaatctaaggaatgktgatgatgagaagaaagatggaaatgttgaggtggttgcatatttggtttgttagaatatctgtcatcacctgggctwtttgaagctgctgttgctgatgttgttttattgactcatgaagacaactgaaaagattgctttgtaaccttatttttttctgatgtgtgtttacatccatgtctatatatacatattgcatatgtatatatctgtatgtgcatgtatatgttaaaaatctgatataagtgaaaacatgctctgtgctttgaaacaaaaaaaaaaaaaaaaaactcgagggggggcccggtacccaattcgccctatagtgagtcgnattacaattcactggccgcgntttacaacgtcgngactgggaaaaccctggcgttacccaacttaatcgccttgcagcacatccccctttcgncagctggcgtaatagcgaagaggcccg

SEQ ID NO: 85 - DNA, 1559 bp, Homo sapiens
  misc_feature (1445)..(1445): n equals a,t,g, or c
  misc_feature (1551)..(1551): n equals a,t,g, or c
atccagcagtggggagacagcgtgctgggcaggcgctgccgagaccttctcctgcagctctacctacagcggccggagctgcgggtgcccgtgcctgaggtcctactgcacagcgaaggggctgccagcagcagcgtctgcaagctggacggactcatccaccgcttcatcacgctccttgcggacaccagcgactcccgggcgttggagaaccgaggggcggatgccagcatggcctgccggaagctggcggtggcgcacccgctgctgctgctcaggcacctgcccatgatcgcggcgctcctgcacggccgcacccacctcaacttccaggagttccggcagcagaaccacctgagctgcttcctgcacgtgctgggcctgctggagctgctgcagccgcacgtgttccgcagcgagcaccagggggcgctgtgggactgccttctgtccttcatccgcctgctgctgaattacaggaagtcctcccgccatctggctgccttcatcaacaagtttgtgcagttcatccataagtacattacctacaatgccccagcagccatctccttcctgcagaagcacgccgacccgctccacgacctgtccttcgacaacagtgacctggtgatgctgaaatccctccttgcagggctcagcctgcccagcagggacgacaggaccgaccgaggcctggacgaagagggcgaggaggagagctcagccggctccttgcccctggtcagcgtctccctgttcacccctctgaccgcggccgagatggccccctacatgaaacggctttcccggggccaaacggtggaggatctgctggaggttctgagtgacatagacgagatgtcccggcggagacccgagatcctgagcttcttctcgaccaacctgcagcggctgatgagctcggccgaggagtgttgccgcaacctcgccttcagcctggccctgcgctccatgcagaacagccccagcattgcagccgctttcctgcccacgttcatgtactgcctgggcagccaggactttgaggtggtgcagacggccctccggaacctgcctgagtacgctctcctgtgccaagagcacgcggctgtgctgctccaccgggccttcctggtgggcatgtacggccagatggaccccagcgcgcagatctccgaggccctgaggatcctgcatatggaggccgtgatgtgagcctgtggcagccgacccccctccaagccccggcccgtcccgtccccggggatcctcgaggcaaagcccaggaagcgtgggcgttgctggtctgtccgaggaggtgagggcgccgagccctgaggccaggcaggcccaggagcaatactccgagccctggggtggctccgggccggccgctggcatcaggggccgtccagcaagccctcattcaccttctgggccacagncctgcgcggagcggcggatccccccgggcatggcctgggctggttttgaatgaaacgacctgaactgtcaaaaaaaaaaaaaaaaaaacccgrgggggggcccggnacccaatt

SEQ ID NO: 86 - DNA, 1231 bp, Homo sapiens
ggcacgagtgaatgtcgaggagttccaggatctctggcctcagttgtccttggttattgatgggggacaaattggggatggccagagccccgagtgtcgccttggctcaactgtggttgatttgtctgtgcccggaaagtttggcatcattcgtccaggctgtgccctggaaagtactacagccatcctccaacagaagtacggactgctcccctcacatgcgtcctacctgtgaaactctgggaagcaggaaggcccaagacctggtgctggatactatgtgtctgtccactgacgactgtcaaggcctcatttgcagaggccaccggagctagggcactagcctgacttttaaggcagtgtgtctttctgagcactgtagaccaagcccttggagctgctggtttagccttgcacctggggaaaggatgtatttatttgtattttcatatatcagccaaaagctgaatggaaaagttaagaacattcctaggtggccttattctaataagtttcttctgtctgttttgtttttcaattgaaaagtaattaaataacagattagaatctagtgagagcctcctctctggtgggtggtggcatttaaggtcaaaccagccagaagtgctggtgctgtttaaaaagtctcaggtggctgcgtgtggtggctcatgcctgtaatcccaacattctgggaggcccaggcgggagaactgcttgagccccaggagttcagaatcagcctgggcaacatagcaatactccgtctcataaaaattaataaataaaaagtctcaggtgaccaaaggctcctgaagctagaaccaggtttggataaagattgaagagccacaggccactcttccctctgagccattgggcctagtggtgtcatgtattgtaattgctcgcagggagagcagtctttttggtgtaatagtgggatgtctgcttagttggcaggggttcagtccaaatggaagaatattgggaaataaacctccactatcctttatagccagggacttttttcctatttattcataaaataaattatagttaattatacccataacacctttatttaaatccagtgttctccgcagccttttgtctatttatatgtgtaccaagtgttaaacataattattattgggcatttgaactttgtttttctttaaagaaatgctgctattaaacatatttgtaaatggaaaaaaaaaaaaaaaaa

SEQ ID NO: 87 - DNA, 1189 bp, Homo sapiens
gcgtccgctgggctggaacagcacagaacccacagggctgccgtccacactctcccggtcagagtcctgggaccacatggggacgctgccatggcttcttgccttcttcattctgggtctccaggcttgggatactcccaccatcgtctcccgcaaggagtggggggcaagaccgctcgcctgcagggccctgctgaccctgcctgtggcctacatcatcacagaccagctcccagggatgcagtgccagcagcagagcgtttgcagccagatgctgcgggggttgcagtcccattccgtctacaccataggctggtgcgacgtggcgtacaacttcctggttggggatgatggcagggtgtatgaaggtgttggctggaacatccaaggcttgcacacccagggctacaacaacatttccctgggcatcgccttctttggcaataagataagcagcagtcccagccctgctgccttatcagctgcagagggtctgatctcctatgccatccagaagggtcacctgtcgcccaggtatattcagccacttcttctgaaagaagagacctgcctggaccctcaacatccagtgatgcccaggaaggtttgccccaacatcatcaaacgatctgcttgggaagccagagagacacactgccctaaaatgaacctcccagccaaatatgtcatcatcatccacaccgctggcacaagctgcactgtatccacagactgccagactgtcgtccgaaacatacagtcctttcacatggacacacggaacttttgtgacattggatatcaataaggccaggcgtggcggcgattacgtctgtaatcccaggactttgggaggccaaggcgggcagatcacttcaggccaggaattcaagagcagcctggccaatatggcgaaactctgtctctactgaaaacaaacaaacaaacaaacaaacaaacaaagaaacaacaaaaattagccgggtgtggtggcacacgcctgtagtcccagctactcaggaggctgaggcataagaattgcttgaaccctggaggcggaggttgcagtgagctgagattgggccaccgcactccagtctgggagacagagtgagactgtctcaaaacaacaacaaaaaaatccctaacataatctcaaaaaaaaaaaaaaaaaaaaaaaaaaaaaaaa

SEQ ID NO: 88 - DNA, 496 bp, Homo sapiens
tcgacccacgcgtccgaactgacacaatgaaactgtcaggcatgtttctgctcctctctctggctcttttctgctttttaacaggtgtcttcagtcagggaggacaggttgactgtggtgagttccaggacaccaaggtctactgcactcgggaatctaacccacactgtggctctgatggccagacatatggcaataaatgtgccttctgtaaggccatagtgaaaagtggtggaaagattagcctaaagcatcctggaaaatgctgagttaaagccaatgtttcttggtgacttgccagcttttgcagccttcttttctcacttctgcttatacttttgctggtggattcctttaattcataaagacatacctactctgcctgggtcttgaggagttcaatgtatgtctatttctcttgattcacttgtcaataaagtacattctgcaaaagcaaaaaaaaaaaaaaaaaaaaaaaaaaaaaaaaaaaaaaaaa

SEQ ID NO: 89 - DNA, 3153 bp, Homo sapiens
  misc_feature (1)..(1): n equals a,t,g, or c
  misc_feature (2584)..(2584): n equals a,t,g, or c
  misc_feature (2590)..(2590): n equals a,t,g, or c
  misc_feature (3153)..(3153): n equals a,t,g, or c
nggccgtgggtgtacgcggcgcagcgcggcagtcctgatggcccggcatgggttaccgctgctgcccctgctgtcgctcctggtcggcgcgtggctcaagctaggaaatggacaggctactagcatggtccaactgcagggtgggagattcctgatgggaacaaattctccagacagcagagatggtgaagggcctgtgcgggaggcgacagtgaaaccctttgccatcgacatatttcctgtcaccaacaaagatttcagggattttgtcagggagaaaaagtatcggacagaagctgagatgtttggatggagctttgtctttgaggactttgtctctgatgagctgagaaacaaagccacccagccaatgaagtctgtactctggtggcttccagtggaaaaggcattttggaggcagcctgcaggtcctggctctggcatccgagagagactggagcacccagtgttacacgtgagctggaatgacgcccgtgcctactgtgcttggcggggaaaacgactgcccacggaggaagagtgggagtttgccgcccgagggggcttgaagggtcaagtttacccatgggggaactggttccagccaaaccgcaccaacctgtggcagggaaagttccccaagggagacaaagctgaggatggcttccatggagtctccccagtgaatgctttccccgcccagaacaactacgggctctatgacctcctggggaacgtgtgggagtggacagcatcaccgtaccaggctgctgagcaggacatgcgcgtcctccggggggcatcctggatcgacacagctgatggctctgccaatcaccgggcccgggtcaccaccaggatgggcaacactccagattcagcctcagacaacctcggtttccgctgtgctgcagacgcaggccggccgccaggggagctgtaagcagccgggtggtgacaaggagaaaagccttctagggtcactgtcattccctggccatgttgcaaacagcgcaattccaagctcgagagcttcagcctcaggaaagaacttccccttccctgtctcccatccctctgtggcaggcgcctctcaccagggcaggagaggactcagcctcctgtgttttggagaaggggcccaatgtgtgttgacgatggctgggggccaggtgtttctgttagaggccaagtattattgacacaggattgcaaacacacaaacaattggaacagagcactctgaaaggccattttttaagcattttaaaatctattctctccccctttctccctggatgattcaggaagctgacattgtttcctcaaggcagaattttcctggttctgttttctcagccagttgctgtggaaggagaatgctttctttgtggcctcatctgtggtttcgtgtccctctgaaggaaactagtttccactgtgtaacaggcagacatgtaactatttaaagcacagttcagtcctaaaagggtctgggagaaccagatgatgtactaggtgaagcattgcattgtgggaatcacaaagcaaatagtactccagaaagacaaatatcagaagcttcctattcttttttttttttttttttttttgagacagggtctttctctgttgcccaggctagagtgcactggtgatcacggctcactctagccttgaattcctgggcccaagcaattctcccacctcagcctcctgagtagctgggactacaagtgtgcaccaccatgcctggctaattttttgaatttttgtagtgatgggatctcgctctgttgcccagggtggtctcgaactcctggcctcaagcgatcctcccacctcgacctcccaaagtgctgggattacaggtgtgagccacctcgcctgggcccccttctccatatgcctccaaaaacatgtccctggagagtagcctgctcccacactgtcactggatgtcatggggccaataaaatctcctgcaattgtgtatctcagacatttgtgtctttgatcctcaccctgtgaccctaaagggaagaaagcctgagtgtcaagtaactctgggcctcccctaaagagaaatggagatggtggctcatctaggaagtagaggagcagggggttcctggttctcaggccacgtgtgatctctgcccacccagggcctgccccagcctgcaggtattgctgtgtggtgggaacacccacttcccttgtgcacagcctttgagaggggatcgtggcctcagttccaggggttcctggccagggccaagtgctccttctgcagaggcctgcacgcatctcacccctttgacttgtatttccatggcttcccctccccacctgccccctagccctccctgactggccagcccctcagtagtcctcctcggccagggagaggagcacggccttgggtgtgttctcgaaaagggctgcccggttctgctgctgccccttcttcacccagtggccatagattcggaaagcgtaggcgtcgatgagccggcgcagaggccggagggcataggggtctcggatgacgatctcccgggtcacaggcttcacccggcgntactgntagtagatccgcactgaagccagcacggtcagagcgatcaccttgaacttcccccgggggctgaagtgccgcacttcctctaccaagtactgctggaagaaggggtgtgccaaggcctcttccgctgtgtagcggttctggggttgcaccaccaggaatcgggagaccaggtccttcacggtgtccgagtaatcatcccactcgggcgagccaaactggtagttgccgctcatgatcatcctcagcatcagcatctgcttccggtgccagaagggcggggagccggccagcagcgtgtacatgatgacgccagtgctccacatgtccacctctttcccgtagcccgggtggtcctcattcatggagcactcgataatctcaggggccaggtaactgggggtcccgcagacctctcgcagcctctctcccggctccagctggcaggaaaagccaaagtctgtgagcttgatgttcatgttgtcatccaagagaatgttctcgggcttcaggtcccggtgcacgatgttgagtttgtgcaaggtgcagatcacctccagcagagn

SEQ ID NO: 90 - DNA, 2496 bp, Homo sapiens
  misc_feature (2340)..(2340): n equals a,t,g, or c
  misc_feature (2373)..(2373): n equals a,t,g, or c
ggccttacctactagcggaatcgactgaagagacgcctgccagtgcgggaggtaggaagctcgatccccaaagaaaagagcgagtgggcaggcagctgcgagacagaaccggagtgtgcagggtccctagaggccggttcctggtctgtgctgctctcctggaagccatggtacaggcagagctcagggcgatccccaggtgagggcagcggctctgcctgggattccaccgcagtacaaccgggtagatgcggggtggagaagaaaggatgttgcctgcactgctcgccaatagcaccctgagaggctacatttgcagaagcagcagcagcagaagacacagcgccggtccaggaggcggctcgagctgttcgtaaagtcgcccgacagctttttctccgtagtatgcgagttgacaaaacagccagagaacagggctccccattacaatcttttcgagatcttttcccttgctaaccggatctgatttgtgcgaaaacatgccttgcacttgtacctggaggaactggagacagtggattcgacctttagtagcggtcatctacctggtgtcaatagtggttgcggttcccctatgcgtgtgggaattacagaaactggaggttggaatacacaccaaggcttggtttattgctggaatctttttgctgttgactattcctatatcactgtgggtgatattgcaacacttagtgcattatacacaacctgaactacaaaaaccaataataaggattctttggatggtacctatttacagtttagatagttggatagctttgaaatatcccggaattgcaatatatgtggatacctgcagagaatgctatgaagcttatgtaatttacaactttatgggattccttaccaattatctaactaaccggtatccaaatctggtattaatccttgaagccaaagatcaacagaaacatttccctcctttatgttgctgtccaccatgggctatgggagaagtattgctgtttaggtgcaaactaggtgtattacagtacacagttgtcagacctttcaccaccatcgttgctttaatctgtgagctgcttggtatatatgacgaagggaactttagcttttcaaatgcttggacttatttggttataataaacaacatgtcacagttgtttgccatgtattgtctcctgctcttttataaagtactaaaagaagaactgagcccaatccaacctgttggcaaatttctttgtgtaaagctggtggtttttgtttctttttggcaagcagtagttattgctttgttggtaaaagttggcgttatttctgaaaagcatacgtgggaatggcaaactgtagaagctgtggccaccggactccaggattttattatctgtattgagatgttcctcgctgccattgctcatcattacacattctcatataaaccatatgtccaagaagcagaagagggctcatgctttgattcctttcttgccatgtgggatgtctcagatattagagatgatatttctgaacaagtaaggcatgttggacggacagtcaggggacatcccaggaaaaaattgtttcccgaggatcaagatcaaaatgaacatacaagtttattatcatcatcatcacaagatgcaatttccattgcttcttctatgccaccttcacccatgggtcactaccaagggtttggacacactgtgactccccagactacacctaccacagctaagatatctgatgaaatccttagtgatactataggagagaaaaaagaaccttcagataaatccgtggattcctgaacagtatggaaaagcaaactgtgcaactactacattatatcattacctggtatcccatggattttgtgcttgggacagaccataaatgatggaaaatgtcaacacaaaaatagctgaaagccaggtacaactactgcatttatatatgtaagttttgtatatcaaaaataattggtctaaatttcctagacttagacttgatttcttaacattagggtatcgcatactcaaatggtagacaatgaccccaactaaatcttcctgatgttacactgctttatcaagaggatggactttttttttttgaggcagacagagtcttggctctgtcacccaggctggagtgcagtggcgcaatctcgggtcactgcaagctctgcctcccaagttcatgccattctcctgcctcagcctcccaagtagctgcgactacaagcacctgccaccatgcccagctaattttttttttcagtagagacagggtctcaccatgttagccacgatgctcttgatctgaccttgngatcccgcgacctcggccttccaaagtgctggnaatacaggcgtgagccactgggccttgccaagattgggcactttttaacatcagaacttcctatcactgctgcattgagttgctccgcatttattagaagcattatgcctgtacggattgggg

SEQ ID NO: 91 - DNA, 1001 bp, Homo sapiens
  misc_feature (919)..(919): n equals a,t,g, or c
cgcgctggaaccctgtggcggcggccatggccatatggcgctgcccgcctggctgcagccaggtataggaagaatgcgtatcttttcatctattacttaatccagttctgtggccactcttggatatttacaaatatgacagtcagattcttttcatttggaaaaggtaaaactccgaaacagtttttttatttttaacttttaatccttgttttcacctcatcctgcttatattaaatttctacacacctcaaccttctaccacgggatacagattcaatggttgacactttttatgctattggacttgtgatgcgactttgccaatccgtatctctcctggaactgctgcacatatatgttggcattgagtcaaaccatcttctcccaaggtttttgcagctcacagaaagaataatcatcctttttgtggtgatcaccagtcaagaggaagtccaagagaaatatgtggtgtgtgttttattcgtcttttggaatctattggatatggttaggtacacttatagcatgttatcagtcataggaatatcctatgctgtcttgacatggctcagtcaaacactatggatgccaatttatcctttgtgtgttcttgctgaagcatttgccatctatcaatcgctgccttattttgaatcatttggcacttattccaccaagctgccctttgacttatccatctatttcccatatgtgctgaaaatatatctcatgatgctctttataggtatgtattttacctacagtcatctatactcagaaagaagagacatcctcggaatctttcccattaaaaaaaagaagatgtgaagtacagcattccagtgtgacacgagaaaagacaggctgtggattcagtgcagtaaataaaacacaggaagtattctggtggaaaaanaaaaaaaaaaaaaaaaaaaaraaraaaaaaaaawaaaaaaaaaaaaaaaaaaaaaaaaaaaaaaaaaaaaaaaaaaaaaaaa

SEQ ID NO: 92 - DNA, 1142 bp, Homo sapiens
gaagaagtgacacttcttggtcagaatgttaatagttttcgggacaattcggaggtccagttcaacagtgcagtgcctaccaatctcagtcgtggctttaccaccaactataaaaccaagcaaggaggacttcgttttgctcatcttctggatcaggtctccagagtagatcctgaaatgaggatccgttttacctctccccaccccaaggattttcctgatgaggttctgcagctgattcatgagagagataacatctgtaaacagatccacctgccagcccagagtggaagcagccgtgtgttggaggccatgcggaggggatattcaagagaagcttatgtggagttagttcaccatattagagaatctattccaggtgtgagcctcagcagcgatttcattgctggcttttgtggtgagacggaggaagatcacgtccagacagtctctttgctccgggaagttcagtacaacatgggcttcctctttgcctacagcatgagacagaagacacgggcatatcataggctgaaggatgatgtcccggaagaggtaaaattaaggcgtttggaggaactcatcactatcttccgagaagaagcaacaaaagccaatcagacctctgtgggctgtacccagttggtgctagtggaagggctcagtaaacgctctgccactgacctgtgtggcaggaatgatggaaaccttaaggtgatcttccctgatgcagagatggaggatgtcaataaccctgggctcagggtcagagcccagcctggggactatgtgctggtgaagatcacctcagccagttctcagacacttaggggacatgttctctgcaggaccactctgagggactcttctgcatattgctgacctgagaggatggcctcagagctgacttgggcaatcctccccaacaggaaggggagacattgcctgccactgaggaaacaggtcatgaaggtggagataagctgcaaggggcgaagcaactttatgtcagtggaaaacgtgtctctttaaagctgctatgtgaacagcttttacagtcattaaatttacctaaactaaggttaaaaaaaaaaaaaaaaaaaaaaaaaaaaaaaaaaaaaaaaaaaaagggcggccgctct

SEQ ID NO: 93 - DNA, 2238 bp, Homo sapiens
  misc_feature (12)..(12): n equals a,t,g, or c
  misc_feature (45)..(45): n equals a,t,g, or c
tgtccttgttgncgcggctgaagtacgccgtgggccacttcctcnaacgacctgtgcgcgtccatgtggttcacctacctgctgctctacctgcactcggtgcgcgcctacagctcccgcggcgcggggctgctgctgctgctgggccaggtggccgacgggctgtgcacaccgctcgtgggctacgaggccgaccgcgccgccagctgctgcgcccgctacggcccgcgcaaggcctggcacctggtcggcaccgtctgcgtcctgctgtccttccccttcatcttcagcccctgcctgggctgtggggcggccacgcccgagtgggctgccctcctctactacggcccgttcatcgtgatcttccagtttggctgggcctccacacagatctcccacctcagcctcatcccggagctcgtcaccaacgaccatgagaaggtggagctcacggcactcaggtatgcgttcaccgtggtggccaacatcaccgtctacggcgccgcctggctcctgctgcacctgcagggctcgtcgcgggtggagcccacccaagacatcagcatcagcgaccagctggggggccaggacgtgcccgtgttccggaacctgtccctgctggtggtgggtgtcggcgccgtgttctcactgctattccacctgggcacccgggagaggcgccggccgcatgcggaggagccaggcgagcacacccccctgttggcccctgccacggcccagcccctgctgctctggaagcactggctccgggagccggctttctaccaggtgggcatactgtacatgaccaccaggctcatcgtgaacctgtcccagacctacatggccatgtacctcacctactcgctccacctgcccaagaagttcatcgcgaccattcccctggtgatgtacctcagcggcttcttgtcctccttcctcatgaagcccatcaacaagtgcattgggaggaacatgacctacttctcaggcctcctggtgatcctggcctttgccgcctgggtggcgctggcggagggactgggtgtggccgtgtacgcagcggctgtgctgctgggtgctggctgtgccaccatcctcgtcacctcgctggccatgacggccgacctcatcggtccccacacgaacagcggagcgttcgtgtacggctccatgagcttcttggataaggtggccaatgggctggcagtcatggccatccagagcctgcacccttgcccctcagagctctgctgcagggcctgcgtgagcttttaccactgggcgatggtggctgtgacgggcggcgtgggcgtggccgctgccctgtgtctctgtagcctcctgctgtggccgacccgcctgcgacgctcccgaggcggagaacaccgaacacccagtgaaggtgaggggatcagcacggcgccgccaccgtgctggaacgagactcagccacaaggaggtgcgaagctctgacccaggccacagtgcggatgcaccttgaggatgtcacgctcagtgagagacaccagacacagaagggtacgctgtgatcccacttctatgaaatgtccaggacagaccaatccacagaatcagggagaggattcgtgggtgccgggactgaggagggggacctgggggtgactaggtgacataatggggatcagcacgggcggcaccagcacacacgtgctggaatgagaactcagccacaaggggaggtgcgaagttctgacccaggccacagtgcggatgcacctttgaggatgtcacgctcagtgagagacaccagacacagaagggtacgctgtgatcccacttctatgaaatgtccaggacagaccaatccacagaatcagggagaggattcgtgggtgccgggactggggagggggacctgggggtgactaggtgacataatggggacaagggctgcctttctggggtgatgagaatgttctggaatcagaatgggatggctgcacggcgtggttgaagggtactgaaggccacccttcagtgtacgaaggggtagatttttgtatttttaccaacaataaacaaaaagaaaagaaaacaaacaaaaaaaaaaagaaaaagataaaaagaatagagaacaagaaagaaaaaaaaaaaaacaaggggggactttttgggcgggggagaaagggtataaagggcgcggggtcaaaggtttcgagcacccttttttacaagagggaataggggcccata

SEQ ID NO: 94 - DNA, 1052 bp, Homo sapiens
acgcgtccggccagccagtccgcccgtccggagcccggctcgctggggcagcatggcggggtcgccgctgctctgggggccgcgggccgggggcgtcggccttttggtgctgctgctgctcggcctgtttcggccgccccccgcgctctgcgcgcggccggtaaaggagccccgcggcctaagcgcagcgtctccgcccttggctgagactggcgctcctcgccgcttccggcggtcagtgccccgaggtgaggcggcgggggcggtgcaggacctggcgcgggcgctggcgcatctgctggaggccgaacgtcaggagcgggcgcgggccgaggcgcaggaggctgaggatcagcaggcgcgcgtcctggcgcagctgctgcgcgtctggggcgccccccgcaactctgatccggctctgggcctggacgacgaccccgacgcgcctgcagcgcagctcgctcgcgctctgctccgcgcccgccttgaccctgccgccctagcagcccagcttgtccccgcgcccgtccccgccgcggcgctccgaccccggcccccggtctacgacgacggccccgcgggcccggatgctgaggaggcaggcgacgagacacccgacgtggaccccgagctgttgaggtacttgctgggacggattcttgcgggaagcgcggactccgagggggtggcagccccgcgccgcctccgccgtgccgccgaccacgatgtgggctctgagctgccccctgagggcgtgctgggggcgctgctgcgtgtgaaacgcctagagaccccggcgccccaggtgcctgcacgccgcctcttgccaccctgagcactgcccggatcccgtgcaccctgggacccagaagtgcccccgccatcccgccaccaggactgctccccgccagcacgtccagagcaacttaccccggccagccagccctctcacccgaggatccctaccccctggccccacaataaacatgatctgaagcagcaaaaaaaaaaaaaaaaaaaaaaaaaaaaaaaaaaaaaaaaaaaaaaaaaaa

SEQ ID NO: 95 - DNA, 1492 bp, Homo sapiens
gccttcccacactccattccctgtcaagttatggctgtcccctcaccccagctgctcctagagaggcccttkttacctgtgtcattcatgtttctaacaagccaccctccaccccgtcttgtgtgccccatgcacctgtgcatctgtgctgtgtgggtgttggtggcccttttgcgcatgcatggggcatcccctgcccagaccagcgggacaaggagcgggaacggcggctgcaggaggcacggggccggccaggggaggggcgcggcaacacagccactgagaccaccacgaggcacagccagcgggcagctgatggctctgctgtcagcactgttaccaagactgagcggctcgtccactccaatgatggcacacggacggcccgcaccaccacagtggagtcgagtttcgtgaggcgctcggagaatggcagtggcagcaccatgatgcaaaccaagaccttctcctcttcctcctcatccaagaagatgggcagcatcttcgaccgcgargaccaggccagcccacgggccggcagcctggcggcgctcgagaaacggcaggccgagaagaagaaagagctgatgaaggcgcagagtctgcccaagacctcagcctcccaggcgcgcaaggccatgattgaraagctggagaaggagggcgcggccggcagccctggcggaccccgcgcagccgtgcagcgatccaccagcttcggggtccccaacgccaacagcatcaagcagatgctgctggactggtgtcgagccaagactcgcggctacgagcacgtcgacatccagaacttctcctccagctggagtgatgggatggccttctgtgccctggtgcacaacttcttccctgaggccttcgactatgggcagcttagccctcagaaccgacgccagaacttcgaggtggccttctcatctgcggagacccatgcggactgcccgcagctcctggatacagaggacatggtgcggcttcgagagcctgactggaagtgcgtgtacacgtacatccaggaattctaccgctgtctggtccagaaggggctggtaaaaaccaaaaagtcctaamccctgctcggggccccacggatgctggtggactgtgtgcccctggtggaggtggacgacatgatgatcatgggcaagaagcctgaccccaagtgtgtcttcacctatgtgcagtcgctctacaaccacctgcgacgccacgaactgcgcctgcgcggcaagaatgtctagcctgcccgcccgcatggccagccagtggcaagctgccgcccccactctccgggcaccgtctcctgcctgtgcgtccgcccaccgctgccctgtctgttgcgacaccctcccccccacatacacacgcagcgttttgataaattattggttttcaamraaaaaaaaaaaaaaaaaaaaaaaaaaaaaaaaaaaaaaaaaaaaaaaaaaaaaaaaaaaaaaaaaaaaaaaaaaag

SEQ ID NO: 96 - DNA, 954 bp, Homo sapiens
gaattcggcacgagcccacaccaaacctgtggacgccgacccgggaccgccgctggctggctgctggctcactcgaccgtcatggagaccctgggggcccttctggtgctggagtttctgctcctctccccggtggaggcccagcaggccacggagcatcgcctgaagccgtggctggtgggcctggctgcggtagtcggcttcctgttcatcgtctatttggtcttgctggccaaccgcctctggtgttccaaggccagggctgaggacgaggaggagaccacgttcagaatggagtccaacctataccaggaccagagtgaagacaagagagagaagaaagaggccaaggagaaagaagagaagaggaagaaggagaaaaagacagcaaaggaaggagagagcaacttgggactggatctggaggaaaaagagcccggagaccatgagagagcaaagagcacagtcatgtgaagattcctggctgcctcttccaggcagtcccccagagatgcctcttctgccccctaaaagcagtgccctggacttgaagcccgtgaaatgactccatctgggattcagaatacagtgttctcaagtgaagaaggcttggaacccaccccacctccctcattgggggctctctgggcaaacatggttttcatgcacccctcttcctgagcttggtccctgcctggtgattcttcttatactcggagagcatccctggttgaggagacacccgcaatcctccacgatctcatggctccacctgcttctccccactgcctgatttcttttctctctgcctgatgtctactgaacagaacttcccctctcccatgcacccactgccagctgagagctgcttcccaatggcctgcattaaagcattcgtaacagccaaaaaaaaaaaaaaaaaaaaaaaaaaaaaaaaaaaaaaaaaaaactcga

SEQ ID NO: 97 - DNA, 1794 bp, Homo sapiens
  misc_feature (1675)..(1675): n equals a,t,g, or c
gctcctctagtgactgctggggtgctagttttcacggttaccacagaacttgagagaggaaaatgagaacggcaaattaaaatgccataaaattccattcttaacaagcgttagtttttttttcctatatatccactccctcacctatcttatgacatatgagaaatcctaacatgggacttggtgtataattagcattgaatgaatttaagttttctttctttctttcttttcttttatcttctgtggtctcctgcagaatcagtctataaaaagggcatggtaaaaaaaaatctatctcatagcattgttgaaaagattaaatgacataataagatgatgcatatatagtagctagcactgtacctgatgcatattaggagcttgataatattactaacattatcatcatcaatgctatctgagcaaagaggctgttccttctttccagccagagttcttctgttggataatatttccagctgtgaaccccaaccagagaccttgaagcctttatttccttttctctcattggcctttggctgaagtctcctttctgcagagaacaaagtgaccagcttttgatgaactattttcctcttttatccatttccaagtgttagccatagtgaagaagtgtagctgggtgctagcccaactcaagaagtgataatgtwatatccaacccaagataaactcaaggataactttcaacacggctactcaagcagttcaggggggaggcatcttgtagagaggagaccaggaagtcacttggcagctgggccagcacacagagggccattgctccagtaaagcagctaacctccatctcttcatcaaaccatcctagactcagcactctgcagagaaggagcagatggagggaatgtgtggagagattagataagaaggatttctaatctagtgggggagcgagtaaaatgtacagaagtttgagaagccaagctcttatgtammaatccrcccccatcactcaacaatccccactgtatgaataaagcctggaaagtttccaattaaaacagtgcttgtgaatattggcaaggggtatctttgtgtgcagggtacatttaaagggagaagggtgaagatacacccttgccttytaggagtacactttctgagagcttgttcaccaggctgtgagtttctcagtctatctgtttctcagtctgttagtaatgaatgtatctcccacttagcacagcagctagcacatagtagatgcctaacaaatgtgtgttaaattgaatgttggaagtctgtgtcctgaaagcttttcttcacatattacaaggctttttatttgttcaacacatttttaccaagtttttttctgtgttccaggtcttttgattagctgtttttaagtcacagaaatgggtgtcgggaacaaaaccagtcaaaagtcctcattctacatcatttacactttcccttcctatatttataagttttaatatcagcttctacaataggttccagaacaagtggtgctcaaggaatggagaaaatgactattccaaccctagctgtaggtgaaccaaaaaccccagagaaatcaaagtgtagtttaaagcagtgcttctcaagttgtaatgtgcatatagatcacctggggttgttattaaaatgcaaattctaaaagagncaggagaatatcttgagcctgggagccagaggttgcagtgagccgagatcattccactgcattccagcctgggtgacacagcgagactccatcttaaaaaaaaaaaaaaaaaactcgta

SEQ ID NO: 98 - DNA, 1262 bp, Homo sapiens
cctaatggcccgasctgaatacttgaaggagctcaagatgagggaatctcgctgggaagctgacaccctggacaaagagggactgtcggaatctgttcgtagctcttgcacccttcagtgaccctagaagaatgattggacagatgtgagccatctggagcagaggggcactaacccaggctgacgccaagaatgaagtggcccactgcagccctggcgagcaggcttcttggatggacagtgctgagacccccatatcccagagtccccagcctccctcaggttactctgcaccccacagatggtttgatggctgtgctgtatactggaggggagggcaggactctgggagaacagcacttctttcatgagacctttgttactcggtggttactgggtcctgtgcctgtccgttttggggcatgcagccctctatcatttttggctccgagaagagggcaaggggcccccgcaggtarcttctgtgcttgccctcgccctgccagcaggcagctgtgcccctggcctgcccttcccgggaccccttattccaactcagctcctctttgcactggaatggggcactccaacacccctcagggaccaccctccccacagtatgcactcagccccacagaacccaccagtctttctgggaactcacacctgcccgccatcttggtactttaggttaatccctcaagcatgaaagctggatcttttggggtttaagaagcccaagccttgttcctgccctggcctagggagcactcaggagggttccttggtcctcatctctcccacctccgttccctctgggccccacactagccacagcgcgggccttgtgctggagtttgagcctgggacagggagagggaggcttggagacagtctgacccagtgccctctaggccacccacttctaggcctgccctgccgccgtggagccctgggcaagctctttcccctttctgggcctgggtctccccatctcttcaatggggctgataccttcacagcccacagcatgggcacttatgaggacaaagtgaatttaacctggaaaagaatgtatttgagagtttcttttaaataatcagcgggtgttggtgatttgtagcccttctgcccttaaatgcttccttgggcaagagctgtctgtcctccctgcaggaggctgagtgtgaagagtatcattcattgtttctctattaaattattttctgctaaaaaaaaaaaaaaaaaatttctgcggtccg

SEQ ID NO: 99 - DNA, 2572 bp, Homo sapiens
  misc_feature (2527)..(2527): n equals a,t,g, or c
aattcggcacgagtctggaccttcttagmttgcttgatatcaggttgtttttgtagccattttgcttcacagtcacctggaatgccgggagcccctgctcatcccgatcctctccttgtacatgggcgcacttgtgcgctgcaccaccctgtgcctgggctactacaagaacattcacgacatcatccctgacagaagtggcccggagctggggggagatgcaacaataagaaagatgctgagcttctggtggcctttggctctaattctggccacacagagaatcagtcggcctattgtcaacctctttgtttcccgggaccttggtggcagttctgcagccacagaggcagtggcgattttgacagccacataccctgtggtcacatgccatacggctggttgacggaaatccgtgctgtgtatcctgctttcgacaagaataaccccagcaacaaactggtgagcacgagcaacacagtcacggcagcccacatcaagaagttcaccttcgtctgcatggctctgtcactcacgctctgtttcgtgatgttttggacacccaacgtgtctgagaaaatcttgatagacatcatcggagtggactttgcctttgcagaactctgtgttgttcctttgcggatcttctccttcttcccagttccagtcacagtgagggcgcatctcaccgggtggctgatgacactgaagaaaaccttcgtccttgcccccagctctgtgctgcggatcatcgtcctcatcgccagcctcgtggtcctaccctacctgggggtgcacggtgcgaccctgggcgtgggctccctcctggcgggctttgtgggagaatccaccatggtcgccatcgctgcgtgctatgtctaccggaagcagaaaaagaagatggagaatgagtcggccacggagggggaagactctgccatgacagacatgcctccgacagaggaggtgacagacatcgtggaaatgagagaggagaatgaataaggcacgggacgccatgggcactgcagggacagtcagtcaggatgacacttcggcatcatctcttccctctcccatcgtattttgttcccttttttttgttttgttttggtaatgaaagaggccttgatttaaaggtttcgtgtcaattctctagcatactgggtatgctcacactgacggggggacctagtgaatggtctttactgttgctatgtaaaaacaaacgaaacaactgacttcatacccctgcctcacgaaaacccaaaagacacagctgcctcacggttgacgttgtgtcctcctcccctggacaatctcctcttggaaccaaaggactgcagctgtgccatcgcgcctcggtcaccctgcacagcaggccacagactctcctgtcccccttcatcgctcttaagaatcaacaggttaaaactcggcttcctttgatttgcttcccagtcacatggccgtacaaagagatggagccccggtggcctcttaaatttcccttccgccacggagttcgaaaccatctactccacacatgcaggaggcgggtggcacgctgcagcccggagtccccgttcacactgaggaacggagacctgtgaccacagcaggctgacagatggacagaatctcccgtagaaaggtttggtttgaaatgccccgggggcagcaaactgacatggttgaatgatagcatttcactctgcgttctcctagatctgagcaagctgtcagttctcacccccaccgtgtatatacatgagctaacttttttaaattgtcacaaaagcgcatctccagattccagaccctgccgcatgacttttcctgaaggcttgcttttccctcgcctttcctgaaggtcgcattagagcgagtcacatggagcatcctaactttgcattttagtttttacagtgaactgaagctttaagtctcatccagcattctaatgccaggttgctgtagggtaacttttgaagtagatatattacctggttctgctatccttagtcataactctgcggtacaggtaattgagaatgtactacggtacttccctcccacaccatacgataaagcaagacattttataacgataccagagtcactatgtggtcctccctgaaataacgcattcgaaatccatgcagtgcagtatatttttctaagttttggaaagcaggttttttcctttaaaaaaattatagacacggttcactaaattgatttagtcagaattcctagactgaaagaacctaaacaaaaaaatattttaaagatataaatatatgctgtatatgttatgtaatttattttaggctataatacatttcctattttcgcattttcaataaaatgtctctaatacaatacggtgattgcttgtgtgctcaacatacctgcagttgaaacgtattgtatcaatgaacattgtaccttattggcagcagttttataaagtccgtcatttgcatttgaatgtaaggctcagtaaatgacagaactatttttncattatgggtaactgggggaataaatggggtcactgggagtaggg

SEQ ID NO: 100 - DNA, 1488 bp, Homo sapiens
cgccaagtttccggagggagagggtagaaactggagggggtggacctgtcactcacgggactgagggtccttttctcccgctcccaggaggaacgagaatgaatatgactcaagcccgggttctggtggctgcagtggtggggttggtggctgtcctgctctacgcctccatccacaagattgaggagggccatctggctgtgtactacaggggaggagctttactaactagccccagtggaccaggctatcatatcatgttgcctttcattactacgttcagatctgtgcagacaacactacaaactgatgaagttaaaaatgtgccttgtggaacaagtggtggggtcatgatctatattgaccgaatagaagtggttaatatgttggctccttatgcagtgtttgatatcgtgaggaactatactgcagattatgacaagaccttaatcttcaataaaatccaccatgagctgaaccagttctgcagtgcccacacacttcaggaagtttacattgaattgtttgatcaaatagatgaaaacctgaagcaagctctgcagaaagacttaaacctcatggccccaggtctcactatacaggctgtgcgtgttacaaaacccaaaatcccagaagccataagaagaaattttgagttaatggaggctgagaagacaaaactccttatagctgcacagaaacaaaaggttgtggaaaaagaagctgagacagagaggaaaaaggcagttatagaagcagagaagattgcacaagtggcaaaaattcggtttcagcagaaagtgatggaaaaagaaactgaaaagcgcatttctgaaatcgaagatgctgcattcctggcccgagagaaagcgaaagcagatgctgaatattatgctgcacacaaatatgccacctcaaacaagcacaagttgaccccggaatatctggagctcaaaaagtaccaggccattgcttctaacagtaagatctattttggcagcaacatccctaacatgttcgtggactcctcatgtgctttgaaatattcagatattaggactggaagagaaagctcactcccctctaaggaggctcttgaaccctctggagagaacgtcatccaaaacaaagagagcacaggttgatgcaagaggtggaaatgttctccatatcaagatgtggcccaaggggttaagtgggaacaatcattatacggactcttcagatttacagagaacttacacttcatctgttccacctctcctgcgatagtcctgggtgctccactgattggaggatagagccagctgtctgacacacaaatggtcttttcagccacagtcttatcaagtatcctatatgtattcctttctaaactgctactcatgaatgaggaaagtctgatgctaagatactgcctgcactggaatgttaaacactaaatatataacaagctgtgttttcctaagctgaaaaaaaaaaaaaaaa

SEQ ID NO: 101 - DNA, 704 bp, Homo sapiens
  misc_feature (287)..(287): n equals a,t,g, or c
actgtgtctgtcttgtctctgatatttatatgccattatgtggcctctactgccttaggattctaatgttcccactaagatcagctaactcagttccactacagtgtttaccaccatcatctctcgcaaacaaagacagccacttcagagctcctaggaaatagtggtgctcccatcatcattgcattccttaatsacatggtgaaaattaacaatggctaaggagcctttgtgttttctcctctacaatatgcccaggaatttctggcattttggccatcttattnataggctattactgaatttmagcctmatcctmccaaattattaatgccaaaatattaactcttgattcttaggtgagtgcacccatgccaataaatttgccatgatctaaccttaaatgtattctcatatatgctgtccaagtttctrctgattaaaatggcaaggcctttagttctcctacataggttttctctctccagagaaggcctcaattctctgactaggctatgttgggatataactggaggcactaataggtagtagggtaaattctttattttattatttttggagacagggagggtcttgctttgttcagactggagtgcagtggtgtgatcatggctcattgcaactttgaactcctgggcgacagagcaagactccatctcaaaaaaaaaaaaaaaaaaactcga

SEQ ID NO: 102 - DNA, 1022 bp, Homo sapiens
ttcccgggtcgacccacgcgtccgcccacgcgtccggcttggggccagcaccctgtctcaaagatggcaaaatgaggctagttctggatgagctagctggtgtgggttccaaccataggaacacactgatgctcaaatcctaaggtgccaagctctaggccctggaggctggtagaacaggatctatgcctggaatcctggcagggattcctgtcaaggacttgtgtttaagcctgcttcagggcttcaggctgcttctgctctgtgtctgcccaggctggctgagcgggtggatgggtggacagaagggctcaccaaggattgtggacatagggtaggccctggtaccacgggtttcaggctgttatcacttcccttgtaggaacatagccagaagcagatgagccagggtagagggctggcccctcctctcatcttcccttcagtcttaaattgtctccagcgatgggaagaggccagggactgtaacccttgtgctgtgtattctctgagcctctgctcactctcagggccaagcagctcccaagccggggccctctcttggccaaaatctgaggagcagtctaggttacaggctttttggtaggtaggttctggctgcctgttaatgcagttaggccccctgattaggtacagtgagaaacaagctagaacaaccctggcccagaagactgtgcactccagcaagatccagggatgatagccttgcagggccactgggagtttgtgcccaagcttctccctcttctctccccagggggcactgggactggtccctgccctcatccttagcctgggccttccccagaggtattaaagagaagtatgattcctctgtcttcagttcttttcaggggcatcctgcccatagtacccagttcccaaggggcccccagtcacgtggtgaagcctagcactcatgcagctcttagggaaccaaaaaccagcactgaaataaagctgaatgactgactgaaaaaaaaaaaaaaaaagggcggccg

SEQ ID NO: 103 - DNA, 1766 bp, Homo sapiens
  misc_feature (14)..(14): n equals a,t,g, or c
  misc_feature (36)..(36): n equals a,t,g, or c
  misc_feature (1750)..(1750): n equals a,t,g, or c
acgggggctttaangggaaacccttcccggaatttncgggtcgacccacgcgtccggttttgtttatggagggtccagtaagtgcaaacaaccattgcctggtcctaagggttcagagtccccgaattccttcttggaccaggaaagccggagacgaagattcaccattgcagactcggatcagttgcctgggtactcggtggaaaccaacattctgcccacaaaaatgagagagaaaacaccatcttatggcaagccacggcctttgtccatgcctgctgatgggaactggatggggattgtggacccttttgccagacctcgaggtcatggcaggaaaggggaggatgccctttgccggtatttcagtaacgagcggattcctccgatcattgaagagagctcctctcccccataccggttctccagacccacgaccgagcggcatctggtccggggtgcggactacatccgaggaagcaggtgctacatcaactcagatctccacagcagcgccacgattccattccaggaggaagggaccaaaaagaaatctggctcctcagctacgagtcctcgtccacagaaccgtccctcctggtcagctggtttacgcgcctcaaactgttgactcactgagagggaccctgctcaggccacctgcctggctcctgscccaagtgccttgcttttacagtggacagcctcttctcgtttcagcctcagtattatgtagggaccttatgcaatttctttttcttttgaaaagttatctactgcccttcttggaagtttgcaggattggatgggaacaaattcagaggatcttaggtgctggcttgtggagacaaaaggagggaaatgggtagagcctgtttgtcttgcttccccagagatagaatgtgaagacacgcgctagaaatcgcagtcctggccagagacgttatggtcattgtgagggactggtggcattgttcctttttgaggggctggggggactcaaattggtggctgttttcacacagatgtgttggtttgtggtccaacttctttatctgaaaaagccagtgagaaaacatttttgatttgatttttctaaactatctaccatattttaagtgtagcagctttgactttgcaataacgtggcaagtatctgatttctcctttgaggcagaggtttaagtgtaggcctgttacacttgtttgatacctttttcatgacagtctcagtatagatcagttggtacagaaatacatgaacacattttgatagggcttatttcacacaaagaagtttatggttatttgtgtggggtggtgttgttatatattattgtctttaagggaaaagaagctataagattcgctgacagccaaagtatcatttagaaaagtgaagcaacaagatttaggttgatgaaagatacatgagtttgcattttgacctgttcagtgtctgtcttccagcacggtgtgtacacttcttcaaaattgtacacagtttgctaattagaaatatcttggaaagcctcatggtcactaattttcaactagcatcaggtattttgaaaacgtgtgtctggatattaactcttgtttaaactgaatgtatgatattttgttagaatggaaaagtactatcttgttaatttaagtattttaaatatagttgtatatttttcttaaaaaaaaaaaaaaaaaaaaaaaaaagggcggccgctctagaggatcccgcgaggggccccanattacgcgtgagcgtt

SEQ ID NO: 104 - DNA, 2286 bp, Homo sapiens
  misc_feature (2262)..(2262): n equals a,t,g, or c
  misc_feature (2264)..(2264): n equals a,t,g, or c
  misc_feature (2272)..(2272): n equals a,t,g, or c
  misc_feature (2278)..(2279): n equals a,t,g, or c
gctgatgtcgaggttcatcctgaaccacctggtgctggccattccactgagggtgctggtggttctgtgggccttcgtcttgggcctatccagggtcatgctggggcggcacaatgtcaccgacgtagcttttggcttttttctgggctacatgcagtacagcatcgtggactattgctggctctcaccccataatgctccggtcctctttttactgtggagtcaacgatgacaccatctcattgattatggcaccaggaagtctgaaggtttccacattcgatgatgtcaacctaaaccagcagccatcccgcttgtccctcttaggcatttcaggcttcctttgggatttcaggtgtcccatgatcttgatgtgctgctaggctggagcacacactggccattactgaacacagccatattagggaaagcaaaaaaacccaaaaaatcctctattgtatatttattcaacaactgtttatgtttccaggacaactgcaaagaaaacaagctgaggtggttatactgttgctgttaaaagttggtatcagtaagatttgtgttttgtgataatccctaaatcaacataccacttgtaaactgaacttcgagaaagaaacatgatgttcattctgtaaatatacatgcagacaggtcatgtactaatcctagtccttttcctgaggtagattttaaacagtatttttaaagtccaagacataggtttttctagtttattccctgaagatctgttgccacagttgggagatttcttcttaatcctgattttcttggtaagcttttttactttattatctctataatttattatctctatccatatttgtggatcgggtagtgggaaaagagattataatacttgtctttctctcctctccctccatccctcaaaagatctttatgcatttcccactactcccttactgtcttttagcattcagagaaaaagccaacttgcttaaagaggaatcacttaaaaggtaggcatatctaagatgctcatagaagaggaagaatgggacatggccccatgcttatttttgtttacaacgtaacatggcatgagagagggcagagaaactaagttgctggggaaagttagaggaactgaaagtttgggaataggctgaccacatattatgccagtgaccagtatgacaggagatggggccctgctgccagtcatctccactgaataaagaataatgctcctctttcagggtaataaagtggggaaaaggaacgtcttctcaatgcaagaacataagctttctcgtatatacctgtatgctacagtttttcacatggaattccgttttctgaggtacagcacattttaggtaacagtatttaacttgaaattcatcatgggagtctgctgctataccaggcacaagataaaactccaaaatttctgtttacattgacctttacatttaaagctgttcatccatggtgcctccccaaatcataagaccaaagaccaccaaacgcagggtggactctgctcattattctttgacccagaaagactggagaaggtatgtgctttaagtgctgctctacctgaaaagaaatcctttaaattacctatggaagtgatgtcctcagataatcttaatgactattttggcatttataaatagaaatgattatggactttgatctgccatacggaggttcggaacctggagaayggctgtgataagtaggttttgattgagtgaaagcatgagcttgttcagagtgaggggcatagtgaaaaaggaacagccatgcctcawaatcaaatcatttgcrttcccacagcatcctgaataccgactacctcttcacttgctaaagcagctaaactgtgaagctctaagtggtttgggtttgttgtttaaccttagcgagatcctttaactgcagcaatattcaagccagatatttggaagcaaatgatatttcctcttgcagtgtccacaaatctgaatattaggggcatgaaattaggcttaccatctgatttgtaattacaattttggaattctctgttttagttgctgaggcctgagttttctggctcttaaagcatagatcatttcacctgatgtttttgaagcatcctaagtacagtagagtagaaaactgatttctttgttaattgtacactgaataatgccttttaaaaatcaaaataaaattaacaaataatggtgaaaaaaaaaaaaaaaaaaaaaaactcgagggggggcncnaaaacaantcgacnnatagtga

SEQ ID NO: 105 - DNA, 1240 bp, Homo sapiens
  misc_feature (1225)..(1225): n equals a,t,g, or c
gtgaaacgcctgggctcaagctgattcacctgcctccacctcccacagtgctgggattacaaacatgatcccccacgcccagccaacacaaaacttctgatgctctgttttctcatctgtgaactggagctaaggctaagtggtctgtctgtttaataagagtttgaatcagatggcctggcatgaagagtcactggcctgagagaatgtcaggggcatttgtaaatgtgtaaagggctgaaaaatcctgagggattattattattgctattgttgttattattcacagacacatccaacagccattgtctgcctccttatctgtcatgctttctgcacgagcgtcagcctgagcttcaatctgtgtgtatatctgcagcttacgtccttgccacccctccagaacccagtttcatccttgtaggtttttccgaagcaggatttgcacaagtggcgtgttttcttaagtatttattttgcaggccatttactcggcatggctatttttacagtgggtaaggagcaaggctaaaaataacttagctcataaccagacaggttctgcatttgacatttacgtggaattcatttgcatctcatttgttcgcctttctgtttaacaggtagaatgtaagaaagctcagccgaaagaagtcatgttcccacctgggacaagaggccgggcccggggactgccttacaccatggacgcgttcatgcttggcatggggatgctgggtgagtctggacaggaccgcaggtcaccatggactgggagggctatggaggcctctactcccaactgggtcacctaccagtggggcaaactgcttcacctttctaagcctcagtttccttgtctgtagatgaggatgataattccccgttccaagacagttgtgatgattaagtgtgggtgtgtgtgtgtgcatgcatgtgtgtgtgtgtgtgtgtgtttgtatttataatattgccccatgcctggcttataggatatgttagactattttctctcttttccatctccttcctcaaaagaaggaaaagtccccctctattgcctcagccctctcatctgagtgggagttcttaagatgtaaggactcctggctgacttgacttgtgtgggctaaggctacgttttctaaaactkgggagaggagggaagtggtaagggtgggcgataatcctgtctatttaaatgattaacatttttctcttgggntatcaaaatttgcat

SEQ ID NO: 106 - DNA, 997 bp, Homo sapiens
  misc_feature (963)..(963): n equals a,t,g, or c
cccgactctaggccggaagcgcgcggagaccatgtagtgagaccctcgcgaggtctgagagtcactggagctaccagaagcatcatggggccctggggagagccagagctcctggtgtggcgccccgaggcggtagcttcagagcctccagtgcctgtggggctggaggtgaagttgggggccctggtgctgctgctggtgctcaccctcctctgcagcctggtgcccatctgtgtgctgcgccggccaggagctaaccatgaaggctcagcttcccgccagaaagccctgagcctagtaagctgtttcgcggggggcgtctttttggccacttgtctcctggacctgctgcctgactacctggctgccatagatgaggccctggcagccttgcacgtgacgctccagttcccactgcaagagttcatcctggccatgggcttcttcctggtcctggtgatggagcagatcacactggcttacaaggagcagtcagggccgtcacctctggaggaaacaagggctctgctgggaacagtgaatggtgggccgcagcattggcatgatgggccaggggtcccacaggcgagtggagccccagcaaccccctcagccttgcgtgcctgtgtactggtgttctccctggccctccactccgtgttcgaggggctggcggtagggctgcagcgagaccgggctcgggccatggagctgtgcctggctttgctgctccacaagggcatcctggctgtcagcctgtccctgcggctgttgcagagccaccttagggcacaggtggtggctggctgtgggatcctcttctcatgcatgacacctctaggcatcgggctgggtgcagctctggcagagtcggcaggacctctgcaccagctggcccagtctgtgctagagggcatggcagctggcacctttytytatatcacctttytggaaatcctgctntttcatcccaaatttaagggggtttcaagaagaa

SEQ ID NO: 107 - DNA, 312 bp, Homo sapiens
aattcccgggtcgacccacgcgtccgtgatgagtggatttgtactcttacccaggtcctgagggccagcccacccagcatccccacccctgatgacgctgtccctacaactggctgaactggtgcattttgtgtgtgccttccagagccagtggactggtgtgtatccaatgatgccacctctgaaacctacagaaccactatgctttgcatgtgtaccctgcagggtctgagggccaggctgtctggtagctctgctcctgggtgacagagcaagactctgtctcaaaaaaaaaaaaaaagggcggccgct

SEQ ID NO: 108 - DNA, 864 bp, Homo sapiens
ggcacgagcggaccgggcccgcggggctgctgcggggcgatcgggccgggccgctgccgcgccatggactcccgtgtccagcctgagttccagcctcactgagtggccacccccaaagtgctgccagccgaggaagcccccagcactgaccatgtctattatggaccacagccccaccacgggcgtggtcacagtcatcgtcatcctcattgccatcgcggccctgggggcctttgatcctgggctgctggtgctacctgcggctgcagcgcatcagccagtcagaggacgaggagagcatcgtgggggatggggagaccaaggaacccttcctgctggtgcagtattcggccaarggaccgtgcgtggagagaaaggccaagctgatkamtcccaaacggsccggaartycacggstgavccaggatgcaaaggccycctggtccctgtttgcaagccggccaagarggggctgggaggggcaaaamccatacggatgcgctgctgtctgagaggaagggctgacacttgctggcatggcctctgcgggtttcgtccatcgcatgcactgatgcccggggacttggctgtcctgggcttcccctcggcctccaggtgaggctgcccattgcaggcactgggtaggcctgaccttgctggggctcatggccctgtagcgcttttgttacttgaatgtctagctgagcctgtttttgatggagctactactgtaatgcgtgaactaacaaacctgtgaactgtaaataggcccctggaagcacgtgcttaagcccttttgctgatttttaaaaatatcatctagcgcaaaaaaaaaaaaaaaaaaaaaaaaaaaaaaaaaaaaaa

SEQ ID NO: 109 - DNA, 1258 bp, Homo sapiens
  misc_feature (1)..(1): n equals a,t,g, or c
  misc_feature (1196)..(1196): n equals a,t,g, or c
  misc_feature (1200)..(1200): n equals a,t,g, or c
  misc_feature (1237)..(1237): n equals a,t,g, or c
nagatggcgctacgtctgctgcggagggcggcgcgcggagctgcggcggcggcgctgctgaggctgaaagcgtctctagcagctgatatccccagacttggatatagttcctcatcccatcacaagtacatcccccggagggcagtgctttatgtacctggaaatgatgaaaagaaaataaagaagattccatccctgaatgtagattgtgcagtgctcgactgtgaggatggagtggctgcaaacaaaaagaatgaagctcgactgagaattgtaaaaactcttgaagacattgatctgggccctactgaaaaatgtgtgagagtcaactcagtttccagtggtctggcggaagaagacctagagacccttttgcaatcccgggtccttccttccagcctgatgctaccaaaggtggaaagtcctgaagaaatccagtggtttgcagacaaattttcattccacttaaaaggccgaaaacttgaacaaccaatgaatttaatcccttttgtggaaactgcaatgggtttgctcaattttaaggcagtgtgtgaagaaaccctgaaggtcgggcctcaagtaggtctctttctagatgcagtcgtttttggaggagaagactttcgagccagcataggtgcaacaagtagtaaagaaaccctggatattctctacgcccggcaaaagattgttgtcatagcgaaagcctttggtctccaagccgtagatctggtgtacattgactttcgagatggagctgggctgcttagacagtcacgagaaggagccgccatgggcttcactggtaagcaggtgattcaccctaaccaaattgccgtggtccaggagcagttttctccttcccctgaaaaaattaagtgggctgaagaactgattgctgcctttaaagaacatcaacaattaggaaagggggcctttactttccaagggagtatgatcgacatgccattactgaagcaggcccagaacactgttacgcttgccacctccatcaaggaaaaatgatctgttaaatgaagctgtcatcaggctaaagggtattgaagctgcagagggatcaacttgtgcttgccagaggacgccaatgaagtttgaaacaccaacaatcagagattttgtttctgttcctcattaaatcatgagcttttgtgcccgagactctggacggactgttncttnaggaatttaaccggatgggaagttttttaaacttttncaaccaacttttttaaggccc

SEQ ID NO: 110 - DNA, 883 bp, Homo sapiens
  misc_feature (19)..(19): n equals a,t,g, or c
gtcaccgtgggcgtttaantatgatccccggctcagattcgcagactgcactgaacttcggctctacgttgatgaagaagaagtctgatcctgagggtcccgcgctgctcttccctgagagtgaactttccatccggataggtagagctgggcttctttcagacaagagtgagaatggtgaggcatatcagagaaagaaggcggcagccactggccttccagagggtcctgctgtccctgtgccttctcgagggaatctggcacagcccggcggcagcagctggaggaggatcgcactgctcatcttggccatcactatacacaacgttccagagggtctcgctgttggagttggatttggggctatagaaaagacggcatctgctacctttgagagtgccaggaatttggccattggaatcgggatccagaatttccccgagggcctggctgtcagccttcccttgcgaggggcaggcttctccacctggagagctttctggtatgggcagctgagcggcatggtggagcccctggccggggtctttggtgcctttgccgtggtgctggctgagcccatcctgccctacgctctggcctttgctgccggtgccatggtctacgtggtcatggacgacatcatccccgaagcccagatcagtggtaatgggaaactggcatcctgggcctccatcctgggatttgtagtgatgatgtcactggacgttggcctgggctagggctgagacgcttcggaccccgggaaaggccatacgaagaaacagcagtggttggcttctatgggacaacaagcttctttcttcacattaaaacttttttccktcctctcttcttcaaaaaaaaaaaaaaaaaaaaactcgag

SEQ ID NO: 111 - DNA, 1465 bp, Homo sapiens
ggcacgagcgagccaagtttgcaccactgcactccagcctgggcgacagagcaagactcagtctcgaaaaaaaaaaagttggaagcagaagtaaaaaacatggtaaagaatgagaactaaataaatataataattgagaggtctgcattagatgtggcagggagaacaagcaaaaagagatttcagagaagatcactggaattggcagaggccttgaagggcagagtctagcatacagaagatgtaaagccacattctgtgaaggtaagtagatgtgtttacctcttttgcactgtactggtgcattatggggtaaatrtgtattacttttcctgtattgcttagcacagagttttgcctatagcaggcaccagactgtgggcttggtagtacatgactattggtgattacagatcaaaaaggacttgaaatgatcagtttaaggtcttgatgggtattgaagactcaaaggatgatggcaccctgggagtgatccacagaaggacagattatttgaagatgttaataactaaagacaacatggatgttaaatgatgaaaaaaagttggatggaaaataaaccattggatctgcytctggagtccaagaagaatattattcttcctacctcccccttactctggctcttcctattgtagccacatgggtcagtaatgccattgaaaaacaaaattttagactaagtggggtcgcagaaattttggtctatcttaaattgatgacatcttattaaagaatytattgtataaagtgtgcttattctggcatttttttaatgaagaaaaagtgtaattcagtgcacatttatgaatttcaaagatcaataaaaatgggcaaagtatatgaacgcataatccatagaagaagatatctgacaaatgcagttcaataaatatttttttaaataaaaattagcctgtggtaagaattgaaatggagaaagaaatagaaggtagccaggttacctacagctttgtatatgacactatagagctaggactttattccatagatgagggaagtctgctaaagtgtctacattgaacccattattttgctagcattgtagttgatgtacctaaaacagacttgagccggtagagtaagtaggcagacttgtccaagtgagaaaaagatgaaactgtggtgaggataaagagagaaaaggagcagatttaagaaatattaaaacttgaaagtactaagacttgatgatgaactagatgtgttagataagagatagcatggagtctagtaaaagttctgtttttctcactcgtgtgactgcctcaataacacaaagcttgataggaaataaacatgagatagcacatggatctattacaagtttttgaaattgagcttgaaaagctacttcaaaaaataaattctaggccaggtgtgagyccatgcgcttgattaaaaaaaaaaaaaaaaactcgta

SEQ ID NO: 112 - DNA, 1369 bp, Homo sapiens
cccacgcgtccgcccacgcgtccggctggcaagatggcgggaggggtgcgcccgctgmggggcctccgcgccttgtgtcgcgtgctgctcttcctctcgcagttctgcattctgtcgggcggtgaaagtactgaaatcccaccttatgtgatgaagtgtccgagcaatggtttgtgtagcaggcttcctgcagactgtatagactgcacaacaaatttctcctgtacctatgggaagcctgtcacttttgactgtgcagtgaaaccatctgttacctgtgttgatcaagacttcaaatcccaaaagaacttcatcattaacatgacttgcagattttgctggcagcttcctgaaacagattacgagtgtaccaactccaccagctgcatgacggtgtcctgtcctcggcagcgctaccctgccaactgcacggtgcgggaccacgtccactgcttgggtaaccgtacttttcccaaaatgctatattgcaattggactggaggctataagtggtctacggctctggctctaagcatcaccctcggtgggtttggagcagaccgtttctacctgggccagtggsgggaaggcctcggcaagctcttcagcttcggtggcctgggaatatggacgctgatagacgtcctgctcattggagttggctatgttggaccagcagatggctctttgtacatttagctgtggtgtgtgcttcagaaaggagcagggcttagaaaaagcccttttgtccgtagagttgatgtggtgtgagtgatatatttctatgtttttaatgtacagcatctgtactttgtttgccttgataaaggtaagataaatgaaacgctgaactatgctaatctggaatttgtttttatttgcctgaaatatatttttttctgtgaaaaaattaaaacgtacttaagccaggagaatgaattatacagtgattgaaaatccatttaattcctatgacttttgttttgtattgcccaagtcaaactacatcacttgtatctccagcccaaatgtagtctgccttgaaaagtctttcagctgtgactgcaggaagtgggagtgtttttattgttagctaattgctgtgactgcaggaagtgggagtgtttctgttgttggctaattgaagttattaggctcagcttcagtcatgtgtaagttttgcagtgtaatacatatgtagtctggtctgtatatatgaaaatttgaattaaactgcagaatgtttatgtctagttatggtttaaattttcttagtagtatataaaaggtaagagtactgaaaaattaataaaattgcaagttaaraaaaaaaaaaaaaaaaaaaaaaaaaaaaaaaaggagggggggc

SEQ ID NO: 113 - DNA, 596 bp, Homo sapiens
  misc_feature (4)..(4): n equals a,t,g, or c
  misc_feature (8)..(8): n equals a,t,g, or c
  misc_feature (28)..(28): n equals a,t,g, or c
  misc_feature (57)..(57): n equals a,t,g, or c
  misc_feature (61)..(61): n equals a,t,g, or c
gganaccngctttgccccttggtttccncaaagctcgaatttaccctcactaagggnaccnaaagctggagctcccaccgcgttggcggcccgctctagaactagtggaccccccgggctgcaggaattcggcacgagtcctgacctcaggtgatccacccacctcggcttcccaaagtgctaggattataggcttgagctactgtgcccggcccatggtgtttttctttagggctcttcctacagccttgagaagtagataggcatcagagtatggtactataggaatcagaaaaattcaaaacaaatgtggattaagtgtttaggctctatgtggctcacgcagccagaatccttaagtctgtgtgtttctgtgtctcaagactgggctcacattctggctttgtccataacaatgctctgggatttcagggagttccctcatttgtaaaatgagggggtcagagcaggtgatatccatgtttcttccctttctgatattgttgtctgtggcatattctttgtatggcgaatttaataaattatattaatgtgtctctttgaaaaaaaaaaaaaaaaaaaaaaaaaaactcgta

SEQ ID NO: 114 - DNA, 629 bp, Homo sapiens
ggcacgagaacctttggggctgacacaagatcctttagtgtttgggatgacctctttcctgcagacttcttcccctatccctaactcatgcatggaaaacgtttgtcaggctggtttcccgagcctcctgcacctcaacatcacgctcacccttttgggtttagcccagtgttatttagcaaatttctccagctgcagggaaggatcagagcactatctttttttttttttttttctcctggagccaggactgcacaaggcaatggccaaatttagttgaattcagcctaccatcctttgctgatgactcagctctatgccaagtactggagccacagagatgggtcagtcccagcccctgtcctcaggaagcccatggtcagggaaacgttgtagggataagtaatagagggcagttgccttcagggctcctggtggctgctggtccctatggtgccttgatgtgaattagaagacggtgccctttccaggtggattcagacctacactagaacgcacagctttgggagtgacacacaggttggattttagcaccccttgccccttggccagaggtgccctgctgcacggccatacgctgcagcctcgagggacacacaggccaaagt

SEQ ID NO: 115 - DNA, 2497 bp, Homo sapiens
ctgagccactgtgcccagcctcggctcaggtttttcaatacagtcttgaccttggcattcagtatcctcacagcatggttctaattaactttctagctctatttcccttttcctgctccctctctctacaactagtctttctctgattgccccgccctcaacccatctaaactagaccccagggaagcaccttggtccccttcctctctcccactcaccatccaaccaatcaccagagcctgtacattctatattttcaacatcgattcaattgtctacttctttctagcctgccctctctgactgggactccttgagccagcctgatcaccccaatccatccctcacactgtgcccatctttctgaagtaggaatctgatcacaccaccctgctaaaaacactctggttctccccacggcatgtggtgcccttgtatagctggcaaagccttgcatggcacggccccagcctgtgcttcaactcaattgcccgactctctccagctctgctgagccacctaagtcacagatggtttctcctctcatctctgctctcttccatgtgccatttctgtggcttggaatgttcttccctcattctctttctggccctttcccgtcacaccttagacgtgcatcttcctctcgaaaacctctagtgaagcctcccagggccaggcagtaccctcctctggcttcttctggatacagaggaagaatctgagcatcgattctccatctcagcaggcctctgtgtgcctgctgactccgactagaccagagatccgtaaggacagggatcgagttttttttcttttaattcactgcctcaaaaatcctctgtgcattacctattcatcctcttctctcccttaacctgaaccagtgatcttactgtctccatcattgtttttttcttttcttttcttttcttttttttttttgaggtggagtctggctcttcacccaggctggagtgcagtgatgcgatctcgactcactgcaacctccatctcctgggttcaagcgattctcctgcctcagcctccccagtagctgggattacaggcatgcgctaccatccccaactaatttttgcctccataattttgccttttctagaatgtcatacaggtggaattactcagtatgctgcctttttcagattggcttctttcacttagtaatatgcttgttttttgagacagggtcttgctctgtcgcccaggctagagtgtggtggtgcgatcttagctcactgaaacctccacctcccaggttcaagtgactctcctgcctcagcctcccgagtagctgggactacaggcacgtgccaccatacccggctaatttgtggatttttagtacagacggggtttcgtcatgttggccagggtgttgttgaattcctgacctcaagtgatccacctgcctcagcctcccaaagtgttgcgattacaggtgtgagccactgcgccaagcctcatttagtaatatgcatttaaactttctccatgtctttaatggcttgatagctcatttatttttatcatggaatatttcattgtctggatggaccacagtttatttctccattcacctactgaaggacatctcggttgcttctaagttttggcaattatgaataaagctgctataaccatcaagtgcaggtttttgtgtggacctattatcaactaattcgggtaaatctcaaggagtgcaattgctggatcacacagtaagagtgtgtttagttttaagtggctgtgccattttgcattcccaccagcaatgaatgagagtttctgttgctccacattctcactaccattcggtgttgtcagtgttttgcattttggccattctagtaggtgtttacatggtatctagtcatttgaatgggcatatgatgtggaacatctttttttttttaattttattattattatactttaagttttagggtacatgtgcacaacgtgcaggtttgttacatatgtatacatgtgccatgttggtgtgctgcacccattaactagtcatttagcattaggtatatctcctaatgctattggaacatcttttcatgtgtttatttgccatctgtatatcttccctgatgagttggggatgcattctttccatctcagagtccccagaaactaacatagcagttggtacagagttggtgctcaacaaacatcagcttaggaactatgtcctatgtttttttgtttttttttttttttaaaaaggaatgtgagctgttcccaaaacgtatgtccttcccccatgcctctaccctgcccttccacaaactttctgatcttcagcacacactacccaaccatcaaggctgagacttcccgtggccagcagtgtctcatgctggcttcaagccccacagcactgcttttttcaacttctcttgtggtttagactgtctttagcccagcaagagaattcgatatcaagcttatcgataccgtcgac

SEQ ID NO: 116 - DNA, 1217 bp, Homo sapiens
tctggaacctctctcttaattcatatttcccgtaagtctgtccatctgttgtgtggaatctcagtttgtgatattggatagatgcaaataagcaaagctgttacttttcatagtttcaaatgaaaaactcaacatcactactgtataaattattttctagtctatctgtgtttatttttaaattccttttactattctatacattgcacattgctctgggggtaaaaatccartataaaccattagctcattttattgaccattcttgtattcagcaagtatcccaagtacagtggtccataccttgaattttttttcactttttaagtgagatataatttacataccataacaacttagtgggtttcagttatttcaaatacaaggttgtwcatatatcatcactgtctaattccagaacattttatttttattttttttcagcagtggggtcctgccatgttgcccaggctggtcttgaactcctgggctcaagtgatcctcctgcctcagtctcccaaagtcctgggattacaggtgtgcgccaccacacccaccctcaaaacatttttatttcctaaaaaagaaaccccacatccataggcagttccacattccgttcttcctatgatccagctcttggcagctactatagttkgtttyctgtttctgtggatttgtctattctggacatagcatgtaattggagtcatacaatatatggctttttgtgcctggcttctttcacttagcataatgtttttaagattcattcatgttgtagcattatcagcactttgtttcttttatggctaaataacactgcattgtgtgsacataccacattttgtttatccgttaatcagttgatggatatttgggttgtttccacttcggggctattatggatgatgcttctctgaatatttgtgtacaagtttttgtgtggacatttgtttttagttcacttgagtatgtacctaggatggaattactgggtcatgtggtaactgttttaatttcgtaggaactgccaaattgtttcctaaagtggctacggtattttacattcccatcagtactgtatgacagttccgtttatccacatccactccaacacttgttgttatctgttttgattatataatagctattttagtgggtatgaagtcgtatttcaaaaaaaaaaggaattcgatatcaagcttatcgatacc

SEQ ID NO: 117 - DNA, 529 bp, Homo sapiens
acgcgtccgattacttacgtgctcctggctgggatggcactgggcattcagaaaaggttctccccggaggtgctgggcctgtgtgcaagcacagcgctggtgtgggtggtgatggaggtgctggccctgctcctgggcctctacctggccaccgtgcgcagtgacctgagcacctttcacctgctggcctacagtggctacaaatacgtgggaatgatcctcagtgtgctcacggggctgctgttcggcagcgatggctactacgtggcgctggcctggacctcatcggcgctcatgtacttcattgtgcgctctttgcggacagcagccctgggccccgacagcatggggggccccgtcccccggcagcgtctccagctctacctgactctgggagctgcagccttccagcccctcatcatatactggctgactttccacctggtccggtgaccccctggccccagatggcactgagtttttcattcattgaagatttgatttccttgaaaaaaaaaaaaaaaaaaaa

SEQ ID NO: 118 - DNA, 1146 bp, Homo sapiens
cccgtccacaatgcagcagactcttcccaaggccacctagcaagcaaggttgatcggatcatctaaactggccgcctcctgaatatttcactgaatcctggcgttcatgttgaagcagacaaaatgagaaaggaggagggcattgctcacctctcaatagcttttttcgttcaagttctatgtctttatcagctcttgcctgtgattttaccccaattcaaccttgggagtgggaagaatatgaacagataacccttggcctaacagctccatcaaacctccttgagagcaactacctaggccaggctagtgagtgctttgtgaggaagctggtcagaaggttccctcaactccttcctggtcctcctggacactgcagaaaagacttaggggatccccagcagaggccaattgctctccttccttccctgccccaccaggaaaggaataacgtccacagacttgaagcagatagtgaagtagatctgtgagaggttctaggtacttagtgtgtagactttgacgaatatttctcaagttgggagcccttgttaaaaatgatgtttaagggagtggttggggggaagatgaaggcatggaggaggaagaagagaaggaagcccttgccatataaaattcatgcagactaaacagtttccctgacagaataaataaagtggatgctaccccactccagaatcaaaagcaatttaattaaagtctcttaagttgtaaagagttttaaatgatccgtgttgaaggcgaatsctgcyaaatgcagtgggtctgacgtcagctgccgggcctgggctgggaggccatttgctattctgtttaaggcaggctggattgtcttattttggaaccagcttggtggggggtttgctttgctactgcttctgagccctgagcttcaaaggctgaaattaatggtgaacaaaattgtgcggctctggccatcccatgcgggcaagcccattgagggttatcattaagtaaagaaataaagagggggaaaaaagcctgcctgttccaaaaacctcatcagataatgacctcagtgattgggttttcattaccaaacagcatccagagattatcaacccatagaagaagggaggggaaaaaaaaaaaaaaaaaaaattc

SEQ ID NO: 119 - DNA, 1346 bp, Homo sapiens
  misc_feature (537)..(537): n equals a,t,g, or c
  misc_feature (880)..(880): n equals a,t,g, or c
  misc_feature (1115)..(1115): n equals a,t,g, or c
ggcagaggcttgtgaagggtaaagtttaaacccctctgcttagcccctgcctccagcctctgccaggagtaatgtgctcccatagtactctgatccacttgtatttggtgcttccttttttttttcttttccttccttcctcctttcctttcccttcctyttcctsttcctccattcttccctccctccgtcttcctccattcttccctccctccctattcctccattcttccctccctccctccctctcacatcctttaggactcagcatcacctcctctaggcagtctttcctggaytaccaccayttatgcacaaaacacctaagcaytaccttatgtggcctcatttatcactgcttaaatattttttawacacgtgctgtgatgtggcacatgcaggtgtcattcttgakgatccactggttattgccttgaggggatgacaactgcccggtagggtwacctggtgtgactgcacctaaaacagcaataccaaagggcccattgccagttctgtcactgaccagctggggcntctgagtatatcccttaaccactttggaccttaatttggcatctgtcaaatgagatggtggaacttgaggaactctaaggcccctactgtgcaggtcttattaatgattacaacagcagcagcagccagtgtttactgaggacttacaaagcaccaagcactttgcctatcctaatccttacatcaactctacgaagttagtatggttactatccctattttacagatgaggagactaaggctaagagaggttatatgacttgaccacaaggtcataataaagaaacagatttgaatccaggcattctgactttactgttcttagccacataatgggcacasnttygacacacrgttttgtgtactgtttggtggtcactcacagactccatcccagactctgcatgaaccatccctgttctacatttttaaggctcaaactggagtctgggtgaaacctggggacagaagactgctatagtcacaattattagagggaaatgggtgaggaccagtggccagctctgttcatgaacctttgacaattctcacagagagtcttgctttggacagagacnacttacgttgctgttttcagttaccctctttaggaggggagagtaggcctgagtcatgcttcagacacagattaaaatcagatttggtaccaggtgcagtggttcacgcctgtaatcccagcactttgggaggctgagttaggagtatcacttgaggccagaagtttgagagcagcctgggcgacatagtgagacatcctctctctttaaaaaaaaaaaaaaaaaactcga

SEQ ID NO: 120 - DNA, 1079 bp, Homo sapiens
ggcacgaggtgttagaaagttttcgaagcagtgtgagtcttgtacctttgtggtcctgtctcacagacacctgtctattccctgacccttttaaatgctaactttctgcctgtaggaaatcttccctttgtgcttaggtctttttcttctgtgagctttagataaacaacctagtgtttaaactttttaataagggattcattttttaatacatgagaattcatttcaaaattttggttttagttatttattttattctacttggctctttttcagacagatgttctctcctggattgtaaaagtcgaattcaaaggatttttatttgtaatatacttaacctttctcttgtaagttgccatctgtgtagatacagctttgattgcctgacaagaggaaaatgtttcccattatcttttcctgcctgaactatacggtcacttgtgttccagcatagtggttcttaaccctcatagtgtgtcagaatcactttgcagagcttttaaaaactctagatgcctggggaccaccccaaagactccattttgttgtcatgggtcaaagcacagtcttctagtttgcagctagtgttgagtacaactagagtttaacccagttgaattttagtttaatcttggctggtcttgaagatgttagtaatctctattcatttttttkgaaaagtaccaatgaratcagaaagttaattagaaaacatctagttgaatcccctgtttttaatagatggggaaaccaagacccagagaatataatccaaagctacctgtcacataggccacaatttcttttccaatattctgttcttcgctgttcttctaatttgcagaactcctctttaaaaaacctttggagaatgtattggcctcataccctcttccttcagcctgaaagacatgcacctgtcacttatttatgatatttaaatgcaacctctagaacaggggtgtccaatcttctggcttccctgggccacattggaagaagaaatgtcctgggccacacataaaatacactaatgatagccgatgaacttaaaaaaaaaaaaaaaaaaactcgta

SEQ ID NO: 121 - DNA, 2103 bp, Homo sapiens
  misc_feature (2101)..(2102): n equals a,t,g, or c
ttcctcgtagcgagcctagtggcgggtgtttgcattgaaacgtgagcgcgacccgaccttaaagagtggggagcaaagggaggacagagccctttaaaacgaggcgggtggtgcctgcccctttaagggcggggcgtccggacgactgtatctgagccccagactgccccgagtttctgtcgcaggctgcgaggaaaggcccctaggctgggtctgggtgcttggcggcggcggcttcctccccgctcgtcctccccgggcccagaggcacctcggcttcagtcatgctgagcagagtatggaagcacctgactacgaatgctatccgtgcgagaacagctattccacgagaggatccgcgagtgtattatatcaacacttctgtttgcaacactgtacatcctctgccacatcttcctgacccgcttcaagaagcctgctgagttcaccacagggtgtcctgggccgggtctmtgagacagtggtgatgttgatgctcctcactctgctggtgctaggtatggtgtgggtggcatcagccattgtggacaagaacaaggccaacagagagtcactctatgacttttgggagtactatctcccctacctctactcatgcatctccttccttggggttctgctgctcctggctgctggaagacctggaggagcagctgtactgctcagcctttgaggaggcagccctgacccgcaggatctgtaatcctacttcctgctggctgcctttagacatggagctgctacacagacaggtcctggctctgcagacacagagggtcctgctgggtatgtggcttcgtagggcttgggatacctgggtttccccaaggagagtagcccctggttccaggtgcttgctgacagcctcccatccctgcacagagaagaggcggaaggcttcagcctgkcaacggaacctgggctaccccctggctatgctgtgcttgctggtgctgacgggcctgtctgtgctcattgtggccatccacatcctggagctgctcatcgatgaggctgccatgccccgaggcatgcagggtacctccttaggccaggtctccttctccaagctgggctcctttggtgccgtcattcaggttgtactcatcttttacctaatggtgtcctcagttgtgggcttctatagctctccactcttccggagcctgcggcccagatggcacgacactgccatgacgcagataattgggaactgtgtctgtctcctggtcctaagctcagcacttcctgtcttctctcgaaccctggggctcactcgctttgacctgctgggtgactttggacgcttcaactggctgggcaatttctacattgtgttcctctacaacgcagcctttgcaggcctcaccacactctgtctggtgaagaccttcactgcagctgtgcgggcagagctgatccgggcctttgggctggacagactgccgctgcccgtctccggtttcccccaggcatctaggaagacccagcaccagtgacctccagctgggggtgggaaggaaaaaactggacactgccatctgctgcctaggcctggagggaagcccaaggctacttggacctcaggacctggaatctgagagggtgggtggcagaggggagcagagccatctgcactattgcataatctgagccagagtttgggaccaggacctcctgcttttccatacttaactgtggcctcagcatggggtagggctgggtgactgggtctagcccctgatcccaaatctgtttacacatcaatctgcctcactgctgttctgggccatccccatagccatgtttacatgatttgatgtgcaatagggtggggtaggggcagggaaaggactgggccagggcaggctcgggagatagattgtctcccttgcctctggcccagcagagcctaagcactgtgctatcctggaggggctttggaccacctgaaagaccaaggggatagggaggaggaggcttcagccatcagcaataaagttgatcccagggtttgctttgtttttttaaaaaaaaaaaaaaaaaaaaaaaaaaaaaaaaaaaaaaaaaaaaaaaaaanna

SEQ ID NO: 122 - DNA, 1212 bp, Homo sapiens
gccaagcttggcacgargttggtggcggcgtccggaggtgctggtttgttctcggtgaacggcgcgcggggtctctcctgagtgcgagctacgggaccttcgccatgccggggatggtactcttcggccggcgctgggccatcgccagcgacgacttggtcttcccagggttcttcgagctggtcgtgcgagtgctgtggtggattggcattctgacgttgtatctcatgcacagaggaaagctggactgtgctggtggagccttgctcagcagttacttgatcgtcctcatgattctcctggcagttgtcatatgtactgtgtcagccatcatgtgtgtcagcatgagaggaacgatttgtaaccctggaccgcggaagtctatgtctaagctgctttacatccgcctggcgctgttttttccagagatggtctgggcctctctgggggctgcctgggtggcagatggtgttcagtgcgacaggacagttgtaaacggcatcatcgcaaccgtcgtggtcagttggatcatcatcgctgccacagtggtttccattatcattgtctttgaccctcttggggggaaaatggctccatattcctctgccggccccagccacctggatagtcatgattcaagccagttacttaatggcctcaagacagcagctacaagcgtgtgggaaaccagaatcaagctcttgtgctgttgcattgggaaagacgaccatactcgggttgcttyttcgagtacggcagagcttttctcaacctacttttcagacacagatctggtgcccagcgacattgcggcgggcctcgccctgcttcatcagcaacaggacaatatcaggaacaaccaagacctgcccaggtggtctgccatgccccagggagctcccaggaagctgatctggatgcagaattagaaaactgccatcattacatgcagtttgcagcagcggcctatgggtggsccctctacatctacagaaaccccctcacggggctgtgcaggaytggtggtgactgaaattagctggacatggttgcacacacctgtaatcacagctactcgggaggttgaggcgggagaatcgcttgaaccagggagttggaggttgcagtgagtggagatcacaccattgccctgcagcctaagcaacagagcaagattctgtctcaaaaaaaaaaaaaaaaaaaaaactcgag

SEQ ID NO: 123 - DNA, 616 bp, Homo sapiens
  misc_feature (17)..(17): n equals a,t,g, or c
  misc_feature (580)..(580): n equals a,t,g, or c
cmgctrctragcaactnagtgggatsccccgggctgcaggaattcggcacgaggagaacggctgcacgtgggagatgctccgtggatgtttgtagaacgctggcttccgtgtttcctcgttgtggctgtggtggtgtgggtctttgcctgtggacccgtggaagacaaagaagacagttttggatggtcaagctattttcttgcttcagggctccctcccctgctttttgaagcctcacaaaccaggactgtgagggcaggaaggcttggggtctttgtgtgctgagcctcattagggttttaagaacctccctcctttcatctctagcttacgagagggatgattcattatcttccctcctcaggctgcagtagaagcagacagtctctgcctccctgcttgcctttcctccctcccattcactgttgattattgccctcaagaataacaggttgcccagctactcgagargcttaagtgggaggattgcttgaccccaggagttcgaggctgcagtgagctatgatcgcttcactgcgctatagcctggcagacacagagagaccctatctcaagcanacagacaaacaaaaaaaaaaaaaaaaaaaactcgag

SEQ ID NO: 124 - DNA, 536 bp, Homo sapiens
  misc_feature (536)..(536): n equals a,t,g, or c
ggacgagtggggagctggaaggaggatggagtgggaagataatcttcccttggagttcagctgtcccgtgaccaaactcctctctgtccccagctggactcctctagatgctcagatgctccttctcttctttccttctctgtcacaccattcttctgttccttggctcttctgctcatctccttgtggagscawaggtttggggtttatatgagtacaggataggtgacatggtggatcaaaaggcaacattttgtgtgcaaaaacaggaatgcctgttcccattagggtcatgggttkccagggttgagggtggggcctttgctagggaaccaccctcttctacccagtattttcctgtctcctgtctgtatcaataggtacacaatatwtattaaattaatkaatgactatacattatgaaatgggaaatgcaaggtataaaggagaattgctgtccttgaaaagaaatttagtttgtttttttgttgagatggagtcttgctctaagctagagtgcagaatgtaatcaaggn

SEQ ID NO: 125 - DNA, 796 bp, Homo sapiens
ggcacgaggtgacgtgtttctgcatctgttgccatgacaagctccctgcttcacccattgctgtatccccagcacctctctcactgcctggcaagggaaagcactcagaagacgctgaatgaccargtagagtgatgggttgtacagcactgttactccttttccatctctgtgtcccatgtgaaccttatggcacccatgagaaggagcttgtaccaggtttatactttctagtttacagatgagaaaacaggatcagagtggtacagatattggtctaagtcacagagaaagtgaattgtaaaagcagaaacagagcacaggctgcctgacttctagtccagtgctttttgctcaaattgcctcttatttctcaggttattcttgaaatggcagatggggattctgtttaatgaaacaaaagtgacaattctttctttcttggagagaaggtggagacagggtctcactctatcacacaggctggagtgcagtggctcaatcatggctcactgcagcctcaatctcctgggctcaagtgattcttccaccttagcctccttgactcactgggactacaggtgcacaccaccatacctggctaatttttaaagttttttgtagagacagggtctcactatattgtgcattctggtcttgaactcctggtcccaagtgatcttcctgcctcggctttccaaagtgctggaattacaggcatcacccccatgcctagcctgaaaattctttctatgtccttaacatcttctttcccagtatttctccatccactcga

SEQ ID NO: 126 - DNA, 1037 bp, Homo sapiens
ggcacgagctcgtgccraattcggcacgagggtcatagtccacagaggtaaaagttaacaattctgatgctcttgtatgtgcataccagaggctctagggaagaattccctctttctttcttccaccttcttgtggctgctggcattctttggcttgtggtcacatcactcctatcttgaaggccagcatcttcaaatctgtttcttcttcacatagccttctgtgtgtgcagtgccctctacctctctcttataaagacatttgtgattaaatggagggtttaggataatctcgtcaagatccttaacttaatcacaactgcaaaaacctctttcccaaataaggtaacattcacaggttccagggattaggacctattatctttggtaagtattattcagcctaccacaatagctaaaacaattctgaaaaagaagaataaagtgagagaaatcagtttatctgatttcgatacttattgtatagctatggtaaataaggctgcatggtattaaagaaaggacatatatgaatgaaacagaatagaggacccagaaatagacccacacaaaggagcccaaattatttttaaccaaggtagaagacaatttattggaggaaagacagccttttcaacaaatggtactataacaattagatatccataggcaaaaaaaaaaaaaagaatcttgatctaaggctcacaccttatataaaataatattaaactcatggccaggcacagtgactcatgcctataatcccaatacactgggaggctgaggcaagagtatcacttgaggccaggggttcaagactagcctgggcaacacagtgaaactctatctctacaaaaaaattataaactagctgggcatggtggcacatgcctgtagtcacaactactcacgaggctgagaagatcacttaagctgagttgttcaaggttctaatgagctacaatcgtgccactgcactccagcctaggtgacagacaaagaccccatctcaaaaaaaaaaaaaaaaaaaactcgta

SEQ ID NO: 127 - DNA, 841 bp, Homo sapiens
gggctgcaggaattcggcacgagctcgtgccgactctcagagcagggaacagcgggggaaaatgtttacactccatgcacaatctgtgcttccagtccctcaccctatgtggcccaatagctggctggatttcacacttaattggtatttttttctgccttcttcccctgcccccactgactcctctcctctccctttgattgtactcaaggttctggggcctgggccctgggtgggtaccaacagctgctcgctgttcccatgtcctctctccagctttgctgtgtttctctgctacctaatctcagtgactgtgaaaggacattgtgtctgagccatggccagccgctggctggccccctgatctgccccccttctattgtttggatggccatctcctgctgggcctccctgactgtaaaatctctgtactgtttgttaggtttttggtgggaggctgtgataagttccaatgagctgccacttccctggatatgtcaagaagctgatggcaacttggccaattctggcagatatcaggcccccagttcagccccagtcaccctcttttacacatgtgggtcaaccactgtgtgctcagagggtcagtcccttcctctgctgtgtttttcttgagtccttgcactcacttcccctgccccagtcacgatgacccctaaagcttcctttgcccttgctttctagggcatccctagtgaaggggcaaacctgagatttctccgtggacctgacagccaaggcagggcactgtctcctgaggccagtgccagcacgtgcatggttcacagaaaaggatcctgggctcagaatctcgaggggg

SEQ ID NO: 128 - DNA, 2128 bp, Homo sapiens
gtctacctccgggctgaaacgtcaccatgcctccccacagacagacggatggacagatgggcctccctgcacctgctctgtgggtgtgggggctcctgctcagcagcagtttccagacccttctccctgctttccccaagccacccgccttgaatctggggtgctctaccagacccatcccctcatttctaaagatttgagccactagtcgtgtccctctccctcagaaatgccttggtgacacttggctgctttcaactcttccacccatctgcctcttggtctcatctttaccttctgctaaaggtcctgacccccacccccgccacgccatggggcaccccatggtggtgcgtccttgggagcagctctgtccctttccccgtggcctttgccccgcctcctatgacttcgattcccacctgtccccgacccctgggaccactgaccgggcccgatcaccctgtcactgccctgtcatctgcttaccccacacggtgctctgctgacccaggtcttgctgtctcccaacagccccacgaggcttcccgtcgctcctggacactgcaggctgagcccgctgccccgccgcctccatgaggaaggcttttcctctgtgagccccaggccaccctttccctcctttaagtaattacttaagtcccttgccagggccctcccagtaccctttctaaagacacccctgccccagcatgctgcaggctcctgctccactttcctctcaggccctcgtcgctgtggtgctgcctttgttttctgtctctgccacggcagggggtcagctccttggaggtggggcttctgcccttgctgtaccactgcctggcacacagtaggtgctcaataaagacttgcagggtgagctgcctgaagaatagtcaccagaggccagaaatgtctagagctctgccggtagggtgactggccgaggagcctggcctgcatgtgtgcgtgtgtgtgtgtgtgtgtgtgtgtgtgagtcagggtttatatgcaggtgtctacaggagacatgctgggttctgtgctgggtgtgaggaatatgggagcagaaccccagggaggtggcagagacttgggggccaaagggctggggtgcaggggggcaacagccaggtgccactggccaccccagccgcagggagccctgcccaccctccaggtgcctggatgtccaacctcactgctattcccacctcaagccaggcctggagatggaggccccatgactcagccagggccggtttgcagctgcggctgacccagacgggcgggcagcccccagcccccgggcctgcacccaggacagggccgccctccctccctcccccgcttctggctcctaggacaggattctctgaattcagctcccctgaggctggggccaggttggaggccaggcctgggggctctgggctggggtcccagataggggctgggcggccaggcttggaatctggaatccagccccattcctggcatctgcaggagcctcgtggggagggagacttgggatggacttcaaccagccagggctggattcttgccccggaacctgcattcctggggcagccaagggatccttcccacttctgggcccagcttggccctgcctggcattcgaggcccatctggggcttgggggtgtctccccaactctcagacataaggacacccttccaagcttgttccttcacctggcggggccctgagccccacacccctcccctgtcctttctccatccgacatcaagcgcctccctgcctctgctcgcacagtctctgagatggggaactcagcacctcacaggtgggcccagctctggtgctgtctgtgttgggggagctggggcagcccccaaaagaccttggagacagaccctcagaggcaggagcagaggctggcagtggatgctgtgcctggaggccttgagggcgaggtgtgatgatgaggcccaggctgcagggctctttctggctctccagctccggagaacaagggatttcctcctgctctgcccaccctccccagccagtgcatgctcagcctcagcaccgcacctgggcgccctccatgatctgccccacctggacacatggctcgagg

SEQ ID NO: 129 - DNA, 748 bp, Homo sapiens
ggcacgagcgaaactgttttccaatgtggctgaaccactctgcatttccaccagtaatgagaatgagagttgctgttgctccacggcctcaccagcatttggtggtgtcagtgtcttggattttagccatcctaataagtgttagtggctatcattgttttcatttgcaattctcttacatggtgtkgaacatctttccccatgtttatttgtcatctgcatatcttcttcggccagttatctgttcagatcttttgcccgtttttgtttgcttgcatgtttgtttgtgtttgattttttaaagaaagctttttttattattgagttgtaatagtgcttgtatagtgtggataacagttctctatcagataggtcttttgcaaatattttccccaatctgtggactgtcttctcattcttttgataaatggctttaaaataataatctggccgggcgcagtggctcatgcctgtaattccagcactttgggaggccaagggcagatcatctgaggtcgggagttcgagaccagcctgaccaacatggagaaaccccatctctactaaaaatataaaattagtcgggcgtggaggcacatgcctgtaatcccagctacttgagaggctgagacaggagaatctcttgaacccgggaggtggaggttgcagtgagccgaaatcgtgccactgtattccagcctggacaataagagcaaaactccatctcaaaaaaaaaaaaaaactcgag

SEQ ID NO: 130 - DNA, 297 bp, Homo sapiens
ggcacgaggtgtgtttgtgtgtgtgtgtggtgtgtgtatgtgtgtggtgtgtgtatgtgtgtggtgtatgtgtgtgtgtggtgtatgtgtgtgtttgtgtgtgtgtggtgtgtgtatgtgtatttctttgaatgagaaattggctcccatgattatggagctgacaactcccaaggtctgcaggcagcaagctggaggcccaggagggccggtggtgtggctgcagccagtgtctgaaggcctgagaaccaggagggcgggtggtgcagctgcagtgtgaaagccggcaggctcgga

SEQ ID NO: 131 - DNA, 1894 bp, Homo sapiens
ggcacgagcagtctacctggaaattgtcacattatacaaatgtcaacttttgtgtgtgtgtgtgtgttttgttttgttttgcggtcagaggcaagggctaaaagaaagcaagatcagagaaataccaagaggtgtttactgactaaagggcaaagggatctatcagttaaccaaagcaagataaatagaactgccaattaactttatattctcagaagcagtgagcaaagaacgctgcctgaacaatgaaagtgttgctgcaactttcatatttgctgttgtctgcatgtaatttgtttccttttacatagaaatatgtggtattaacagagggatgtgattagaataccagcggaagctctctttgataggagacacacaggcaggtgcctaacagcctatggagatcaggacagtttctctccagtaaactcacaaattgtggggaccatgatctgcttaataagtaaaagggcaatggggccaagattacaatgttgaaaacatccaggcttcccacctggagtcctggcctcacagtaataataagaataaagatgtattgagatatatctagacctaactatataaatagacagatagatatacacacatacacacactgtgctaagatgcttcacatgaactccctcatttcaccctcaaacaaccacagggtagatggtttatcaccgttttagagataagaaaactccagttagtacgtcactgaagatctacacagtgacgtagatgttgtgatagacatttcttaaaaatattccaattaatcctcagaacacctgtgagaagtatactaaatatactaagctccattttatgaatgaggaatcagagtcaaggagacgagataacatgtcccaggtgacggtattagcggtcatagcaggatttgagcccagctctgtctgtcttcaaaactcatgtttaggagactcttctgctttccaccaaagcccttgatttgaacctttgctctctcctgaatccacacttctcctgaaggaggagcaaggtggagatgggatagggcacaggatggctgactctctgactggagggcctaagaaaccccactttgacacacacacagaaaactgtgccctgggtgggggtgtggggcttcatgagaaaatcaagtagcaagagagagtcttaacatgcttagatggcatgtgcctgttctcctgatttaatggatgagaaaactgagatccagggcaagggcagtgagatagtgagggtctcttagaatgagtacagccttcagggacccaccccatgtacccgtgggatcaagacgagccagaggatacctcctaagtaagaacagaaggaacagaaaacccttaaggtttgttgttgttgttgtgacagaatctcgctctgttgcccaggctggagagcagtggcacagtctcggctcactgcaacttctgcctcccaggttcaagcgattctcctgcctcaccctcccgagtagctgggattacaggcacccgccaccatgcctggctaatttttgtatttttaatacagacgaggtttcaccatgttggccaggctggtctcaaactcctgacctcaagtgatccacccaccccggcctcccaaagtgctgggattacaggcgtgagccaccgcacctggcctgaaaacacgtatcatacttgctatgtgccagacacaattctaaccacttttccacagattaactcagccttcaaacaatcctaaaaagtaggtatgattatttcctgcattttacagccaaagaaactgaagcacagagagattaagaggacttgtgcaaggtcatggagggctatagtcctaccctctgaagtaagttaaaccctctccagaaaaagcc

SEQ ID NO: 132 - DNA, 1355 bp, Homo sapiens
  misc_feature (1327)..(1327): n equals a,t,g, or c
gcccctgctggatggcactgtgggtaacctgcatcctttcactgtgcacatggttctcatgcctttacggagcagactccttggcaaataaatgcctcagtgcaggagccacacgcaaggcatttcccttctgtgtcctctttcgtgatcttgaggtgggacttgggtttgaaggctttgtcactcacctggcatgcaaactcttttgttattgtgaactctctgacagtgctttaagtctggggcacgaataaataattttccacacagctcacaactgtagggcttacatccagtgtgtgtgcgttatgtctgtgtgtgtatccttatttttttgagacggagtctccctctgtcacccaggctggagtgcagtggcgcgatctcggctcactgcaacctccgcctcctgggttcaaacgattctcctgcctcagcctcccgagtagctgggattacaggcacccaccamcacgcctggctaatttttgtatttttagtagagatggggtttctccatgttggtcaggctggtctcgatttcctgaccttgtgatccgcctgcctcggcctcccaaagtgctgtgattataggtgtgacacaccacacccggtcctgtgtatgttttgagacggagtctcactctgtcacccaggctgaagtgcagtggcaggatctcttctcactgcaacctccacctcctgggctcaagtgattctcctgcctcagcctcccaagtagctggtatttcagacttgcaccatgatgcctggctactttttatatttttagtagagacggagtttcaccagcctggtctcgaactcctgacctcaagtgatccacccaccttggcctcccaaagtactgggattacagacatgagccatcacgcccggcccctaagtggatttttaggcattctttcaggtgggcctctgtggtgaaaccttttgtgcacatttcacaaacggcttctccgctgtgtggcatttctcagctttctccactgccttcacaggaaacttcttcccgcactcctggccgacgtcgctccctaggtgactgtgcggcaaaagctcagacctcaggacactggtggctgttgtccagcctagtgtctgcttaccccgcactcatcccgtagtcacacgtgaaggcttgaggggtctggaacttcctggccgtagcaatggactttctgaactttcttgctctttcagaattgcgttttgaccctgagtgtggtcgtgggtgactcgccggcctcccgccccggggtgtggtgcctttgttctgagtcatcacaagtgccatcatcctgancctagcwtctttcagatcaccctctcga

SEQ ID NO: 133 - DNA, 1382 bp, Homo sapiens
cccacgcgtccgctgaattgcggccgtatgcgcggctctgtggagtgcacctggggttgggggcactgtgcccccagccccctgctcctttggactctacttctgtttgcagccccatttggcctgctgggggagaagacccgccagctgcttgagtttgacagcaccaacgtgtccgatacggcagcaaagcctttgggaagaccatatcctccatactccttggccgatttctcttggaacaacatcactgattcattggatcctgccaccctgagtgccacatttcaaggccaccccatgaacgaccctaccaggacttttgccaatggcagcctggccttcagggtccaggccttttccaggtccagccgaccagcccaaccccctcgcctcctgcacacagcagacacctgtcagctagaggtggccctgattggagcctctccccggggaaaccgttccctgtttgggctggaggtagccacattgggccagggccctgactgcccctcaatgcaggagcagcactccatcgacgatgaatatgcaccggccgtcttccagttggaccagctactgtggggctccctcccatcaggctttgcacagtggcgaccagtggcttactcccagaagccggggggccgagaatcagccctgccctgccaagcttcccctcttcatcctgccttagcatactctcttccccagtcacccattgtccgagccttctttgggtcccagaataacttctgtgccttcaatctgacgttcggggcttccacaggccctggctattgggaccaacactacctcagctggtcgatgctcctgggtgtgggcttccctccagtggacggcttgtccccactagtcctgggcatcatggcagtggccctgggtgccccagggctcatgctgctagggggcggcttggttctgctgctgcaccacaagaagtactcagagtaccagtccataaattaaggcccgctctctggagggaaggacattactgaacctgtcttgctgtgcctcgaaactctggaggttggagcatcaagttccagccggccccttcactcccccatcttgcttttctgtggaacctcagaggccagcctcgacttcctggagacccccaggtggggcttccttcatactttgttgggggactttggaggcgggcaggggacagggctattgataaggtccccttggtgttgccttcttgcatctccacacatttcccttggatgggacttgcaggcctaaatgagaggcattctgactggttggctgccctggaaggcaagaaaatagatttattttttttcaaaaaaaaaaaaaaaaaaaaaaaaaaaaaaaaaaaaaaaaaa

SEQ ID NO: 134 - DNA, 791 bp, Homo sapiens
cccacgcgtccggttctcctgcttgccatcaatggagtgacagagtgtttcacatttgctgccatgagcaaagaggaggtcgacaggtacaattttgtgatgctggccctgtcctcctcattcctggtgttatcctatctcttgacccgttggtgtggcagcgtgggcttcatcttggccaactgctttaacatgggcattcggatcacgcagagcctttgcttcatccaccgctactaccgaagagcccccacaggcccctggctggcctgcacctatcgccagtcctgctcgggacatttgccctcagtggtggggttactgctgtttcggaggtattcctctgctgtgagcagggctggccagccagactggcacacattgctgtgggggccttctgtctgggagcaactctcgggacagcattcctcacagagaccaagctgatccatttcctcaggactcagttaggtgtgcccagacgcactgacaaaatgacgtgacttcagggaagcctggacacccgaggcacctggaccagctatgggtagttctgtgggtggaacacattctgtgtaagagccccactgagggctctgcagcggagtgacagcaaccccagagatgaggcaccagagagtgccactgcatgagacacctgtgaccattcgaagtctgaaatgcggggggggagtttcatttttaagtgaagaccaaaagccctttaaaaataatagttttttatcattttatagtaaaaaaaaaaaaaaaaaaaaaaaaagggcggccgc

SEQ ID NO: 135 - DNA, 2163 bp, Homo sapiens
cgcccacgcgtccgaggcggcggagccccagccccacccagtgcggagcgcgccgcgagccccgccgyaagctgagcgcctccgcccgccaggcgcgccggcgccgggccatgtactcggggaaccgcagcggcggccacggctactgggacggcggcggggccgcgggcgctgaggggccggcgccggcggggacactgagccccgcgcccctcttcagccccggcacctacgagcgcctggcgctgctgctgggctccattgggctgctgggcgtcggcaacaacctgctggtgctcgtcctctactacaagttccagcggctccgcactcccactcacctcctcctggtcaacatcagcctcagcgacctgctggtgtccctcttcggggtcacctttaccttcgtgtcctgcctgaggaacggctgggtgtgggacaccgtgggctgcgtgtgggacgggtttagcggcagcctcttcgggattgtttccattgccaccctaaccgtgctggcctatgaacgttacattcgcgtggtccatgccagagtgatcaatttttcctgggcctggagggccattacctacatctggctctactcactggcgtgggcaggagcacctctcctgggatggaacaggtacatcctggacgtacacggactaggctgcactgtggactggaaatccaaggatgccaacgattcctcctttgtgcttttcttatttcttggctgcctggtggtgcccctgggtgtcatagcccattgctatggccatattctatattccattcgaatgcttcgttgtgtggaagatcttcagacaattcaagtgatcaagattttaaaatatgaaaagaaactggccaaaatgtgctttttaatgatattcaccttcctggtctgttggatgccttatatcgtgatctgcttcttggtggttaatggtcatggtcacctggtcactccaacaatatctattgtttcgtacctctttgctaaatcgaacactgtatacaatccagtgatttatgtcttcatgatcagaaagtttcgaagatcccttttgcagcttctgtgcctccgactgctgaggtgccagaggcctgctaaagacctaccagcagctggaagtgaaatgcagatcagacccattgtgatgtcacagaaagatggggacaggccaaagaaaaaagtgactttcaactcttcttccatcatttttatcatcaccagtgatgaatcactgtcagttgacgacagcgacaaaaccaatgggtccaaagttgatgtaatccaagttcgtcctttgtaggaatgaagaatggcaacgaaagatggggccttaaattggatgccacttttggactttcatcataagaagtgtctggaatacccgttctatgtaatatcaacagaaccttgtggtccagcaggaaatccgaattgcccatatgctcttgggcctcaggaagaggttgaacaaaaacaaattcttttaattcaacgggtgctttacataatgaaaaaaccacttgtggcacacgatgggcatctaacatcatcatcttctaatgtgttggagattttcatttcaaatatattttttaaattactctattttccaaaacacgtaatgcatttttctcgaaaataccttactgtaaaaataactgtcgcgtacacatgtgtgaagtagctagaacatactgaattttttttgtactgttggactctattcagtgtcatgtcctatatctgatcaagttatcaaggagataattctagaatgaaaaagaaaatcctcttgttggaaacaaaagacgttttatatgtgcagtatgacaaagaggagtttcagagacaactttgaatccttgtcagcctggagaccagcaccagaggaatctacaaggcaaactcccatatatttgcttcccccaaattgctgcccctacagactcaaagctctttttctttgttttgttgtttctctaaaaatttactgttctttgtcgatgctatataagccagggagttctaagacgccagctctttgagatttgctcattcccctgtatttcccacatatatattacatatacccgctaataaatttatgtttgttttaaaaaaaaaaaaaaaaaactcgagggggg

SEQ ID NO: 136 - DNA, 2087 bp, Homo sapiens
  misc_feature (1)..(1): n equals a,t,g, or c
ncccacgcgtccgctgttgctcaaaggaaataggagttggtgtgcttgtgaccaaggggttacacttccagcttttaaaattctcctttacatgtgctcagtgttttgttttgtgttttggtttctgttttttattttaattcccacattgggcacaagaatcagaatatggatagctagtttaagaaacttttgtgggtgcactgtagcatagatgacagaatttgatgttccccccatctccaattcagttcagggcattccacagttaaacagaaatgggaacgtggggctcttataaatgaaatgggcgctcacagttttggttttcagctcttcatgtctgtaagtgtgctttgggggaggctatgtctgtatggtcgattctcagttatcacatttgcctctcctcccactaccttcatggacattcagtgctgtttcgcactgcagttagagagaagggacggacagttggtgacactcagccacattgctacttttatctgttctggtaagaagttagatagatggtagattgaagcaattgggtagaattagttgggggaatatttatgagttgctgtgtttgttgattagttccatctctttcccattttaactgagaattgattatatatagctctaagtatataggtatttaaacaaccccacaagcggctgtatcagtaacatttattaattccactatagtgagggaggatttccattctaaataccttattttgagggatttataaaacttagttgtaaaagagaaagcccacatagtgggaataaattgcttcagccatttttagtatttgagagcactagggaagatgtttagtagctgtgtggatgccttttttcacaccctgtctattgaatgctgcatccattcacgaagttaaatgttacatgcagttagtccttaatgtggactggatctgtacttttgttttggattaaaacatttaaagatttttgaagtgcagctactccccacgtggcatttgatacacataaaagtcatactgtgtgtgcacaaagagtacatggattttccagcatattgctttaaaaaattatataaactgttaaaatattaacacctcaggctacctgctgtattctgtcccattgacccctggaattggatttactgcaagtgattgataattcaattatgtggcttttcccctttaatcttgccatttaaattacagtagaaagacaaaatcaagtaaaataaagtgttagataatagaaagagtgttaagaccagcccacttttctcatgtttatgttctttcatttggaccaagaatctccgcatggaggttgatttgccactggggactttggctaagactattaggtttgctttcaactagatgttcctgagacaagcagagggacactgcaattccccttccatgcctgctgttctcccccatgtaagtcttctttgaaattaacggatgtgtctcctttggaacagccccataacaaaagagaactactgatctgagcataggaaagtagaggctctaccacttttcagttgaaaaagcaagactttctctgtgtttctgaaacaaggcataatgttgtcacagaatcagagatccagtctcacttttccacaaatctccaaatctccagtcttatcttgtgtgctctaatggtttggttcaatccctttccaactcttgttttcaaagcatggggcctgagtgttctccactcctcctaagaaaggagcttgggtggaagggaccatgctgacctcctccatcagagggctcttccagtagtattctcggatgcaacctccatttctcagttaccattatttcctgtatcagctttgtccttcctggagggatgcacagtgatccggcccaccactgttgttgtcttgtgcttctgctctttcctatggtttcaggttattttctgggtttcccctattcttcttttatttccttttttttttatatttgctttcctttctactgcttttagatttgcaggagatgcaagtttcagctcaatgtttggcttctctcaatatggaaatt

SEQ ID NO: 137 - DNA, 830 bp, Homo sapiens
ggcacgagtaaggactgtgttctttatgcatttcttgatccaggcatggcagttcctcttttcctgtacatattcacactcctgccacttctaccctttctcttatccctctgcttttcacctctgactgtaaaaagaagtagcagttccgaaagcaagagttccctatgaacacggaagaagacattggcaacttttgagtacaacaactatatttaatagagtaatttaagaacatcagccagtgaattttatacaagatagtgaaagagaaaaggaagattaattaggggtagtttaggatgccattaaatagcctagaattaggggagtagtcgttgaatagaaaggaggccacaaatttgagggatataagctaagaattggtaagccaagaagaaggaaaaggtttgggcagtaaggataatgaggaacaaaatagagaactcagaagcaatatctgactgttatcattggaagaatttttttgcttgcttgaggctggatattgaagtggatcaggatacttgagtgactatctgatgggcttttggaactagctctcaagaggtgaaaattagcttttttttctttttctttctttttttttttttttgaggcaaggtctcactgttgttgaggctgaacctcctgggctcaagcagttgtcccattgcagcctcctcagatactctgtaagccaaggcagggggaatattttgtgctcagtagtttgaggctgtggtgagctaagatcacactgctgtgctcacttcagcctgggcaacacagtgaaaccccgtctccatctgtttaaaaaaaaaaaaaaa

SEQ ID NO: 138 - DNA, 1939 bp, Homo sapiens
gaacacaaacatgcagtctgtagcagatggtaataggctgayatattacacttgttgatgtaaatctgataggtttctttctctccaaggacagctttttaaatatttaacagtatcaataatttttcagtttctgtgagaattttataatttataatttgcagacttaatgtataatctattttgtcctaacaattacaaatatattttttatttcagattrtatatattcctaccagatggagataattacagctttaaaaatttttattttttcattttatttcacacattgacattaaatttttatggacacataataactgtacatatatatggggtagaatgtgatgttttaatacatgtactcaatgtgtaatgatcaaatcagggtaatttgcataatgatttttctgtagggagaaaattcaaaatctactcttctggctattttcaaatatataatatgttattgttaactatactcatcctactatgcaataggacaccagaacttattcctgggttctacatccgttaaggcaaccaaggattggaaatattggaaaaaaaaattgcgtctgtactgaacatgtacagacttttttcttgtccttattccttacacaatatagtacaataactatttgcatgacatttacatcggatattatgagtgatctagagttgatatgaagtatatgggaggatgtgcaaaggtgatgtgcaaatactatgtcattttatatcagggacttgagtatcctttgttaycctcaggagatcctgaaacyagtcccccatggatactgagggctgactgtatagtcctatcctcacggaactttcattctaatgrgggaagactgactataaacaaaatatatgtaataggtggtggtaagtaccgtggagaagtaacaaatggggcaaagtgagttatacagctccatycttagaaaccttggagtacttttcttagtttatactcgtggtggtttccttttgtctcctttattacatgggactctgacatgtgcccatagctagggtggcagtaggatctacccgaaaagcgtcctgctgatacaggaccaaagcatcctgttgttctcgagcctataaaaagagctaatggtcttgcttctcttaactgtggcctcctacactgtgttttggatgattggtgatgtcttggatattctgtttctttggaactttgaatatacaacactttactagggaattagcaatggaagcagagcaaagatgtacagaggaaacaatgcrtaactctgatggaattgaagtcatgaggcagcagagagcttaaattasagctttaaaaatttttattttttagagggaatttamttgggagtaacagcagtaatagttaacggagccagaatgcttgagtcatataattgcaaagcagagttgggagcaacagatgctaaagagtagttgctgtagttcctctttgggtcgtaggagcagttgtcatrttmctatayagctactgcatgaagaagagttcttagtgaggcctgggtgaacagctcttcttagtattctgtgtgaccccattygaccttttaacaaatccctaagtaaataaatagcccctmaggwaaactaagtttttctctgctgtttttttgcttgagagagctataactgtaatagacttatatttctgaacattttagtgcttgccaatatttggtaatatttatgtttcctatatttgtaatgaacattcttcttcmggtacatttyttgttaaattattgtttsatgsataaaagttcaccttttattgtataaaattgactcagattaatttatacacattgacaatgggtaaatagagtttttcagattattaaaagctgaaggatgcccatgtaagcaaaaaaaaaaaaaaaaaactcga

SEQ ID NO: 139 - DNA, 2410 bp, Homo sapiens
ccacgcgtccgcttcgacgacgacacctgcagaagtgcggagcccgccatgccgcgccacctctcgggactgctcctgctgctctggccgctgctgctgctgctgccgccgacccccgccgcccccggccccctggcccgcccgggtttgcggaggctgggcacgcggggcccagggggcagtcccgggcgccgccctgtctctgctgtccccacccgcgcgccctattccggggccggccagcccggcggggcccgaggcgcaggtgtttgcaggagcaggcccttggatttggtgttcatcatcgatagttcccgcagtgtgcggcccctggagttcaccaaagtgaagacctttgtctcccagataattgacactctggacattggggcggcagatacacgggtggcagtggtgaactatgctagcaccgtgaagattgagttccatctccagacccactcagataaacagtccttgaaacaggctgtggctcggatcacacccctgtctacaggcaccatgtccggcctggctatccagacagcaatggatgaggccttcacggtggaggcaggagctcgggggcccacttccaacatccctaaggtggccatcatcgtgacagatgggaggccccaggaccaggtgaatgaggtggcggctcgggcccgggcatctggtattgaactctacgccgtgggcgtggaccgggcagacatggagtccctcaagatgatggccagcgagcccctagacgagcacgttttctatgtggagacctacggggtcattgagaaactctcctctagattccaggaaaccttttgcgctctggacccgtgtgtgcttggcacacaccggtgccagcacgtgtgtgtcagtgatggggaaggcaagcaccactgtgagtgcagccaaggctactccttgaacgccgatcagaagacgtgttcagctatcgataagtgtgctctgaacactcacggttgtgaacacatctgtgtgaacgacagaactggctcttaccactgtgagtgctacgaaggttacaccctgaaccaagacaggaagacttgttcggctcaagaccaatgtgcctttggtacacatggctgccagcacatttgtgtaaatgacagagatgggtcccatcactgtgaatgctacgagggttatactctgaatgctgacaacaaaacgtgttcagttcgcagcgagtgtgctgggggctcgcacggctgccagcacctgtgtgtggacgacgggcccgcggcctatcactgcgattgtttccccggctacaccctgaccgaagaccggaggacgtgcgcagccattgaagaagcacgaagactcgtctctacagaagatgcttgtgggtgtgaagccaccctggccttccaggagagggccagctcatatctgcagagactgaatgccaaactcgatgatattttgggcaagttgcaagcagatgcgtatggacaaatacatcgttgaattactcagatttttcacctggatatacggagagcttggtctatttaatatttttgcatacttcaatgttcctgctaataatttgccattgcaaatgctttaatattactggataagtagtatgaggatcttctagagaatcagtaggacataaacgttcacatccttaagagcaaactttagtgtctctaagctatgactgtgaaatgattcatggggaatagaatgaaaagtttggtatctctttatttaccaattgagccatttaatttttaaatgtttatattagtaagataaccattcttacaatgggaactttttatctattttctcttgatagtatttatagtataaaccagttttattattgagagtgtaaattatacaagtatttacacataaaaaagttcatataattgaggtaaatataatttagaactgtttctttaatgctttgttttttgctcactttttgctggaatatcactgaagctgtgatcaggggattataacacatatcaagatcaagtgaacactacatgaaatattgtaagaaacacataactaaagactttagttttgaattaagtgttataacttcttaccaagttttggtaaaaaatcctacattatctttactgtttcactttaggattcaatcaagaaaattatatacttataaatattgatctaaaaagttaacaacaaacccaatgtcgccattttaaagtttaagcttaacttttcttcacttacatatttagtatatgtattttatttttccgcttgaaagcttatagctcttaggagaaaaccatcctttaaattgtgactactcattttttctgtttgtattgtctttagtataataaaaagttactatctttataaaaaaaaaaaaaaaaaa

SEQ ID NO: 140 - DNA, 1491 bp, Homo sapiens
ccacgcgtccgggagccatggcgccgtccgggccgctgctgctggtgctgctcgtgccgctggccgccgcgcgggccgggccctacttccgtcccggccggggctgccgcctgcccctgcggggggaccagctgtcggggctggggcgcaggacctacccccggccgcacgagtacctgtccccatctgacctgcccaagagctgggactggcgcaacgtgaacggggtcaactatgccagtgccaccaggaaccagcatatcccccagtactgtggctcctgctgggcccacggcagcaccagtgccatggcgggaccggatcaacatcaagagaaagggggcgtggccctccaccctgctgtccgtgcagcacgtcctcgactgcgccaacgcgggctcctgtgaggggggcaacgacctgccggtgtggaggtacgcccatgagcacggcatcccggacgagacctgcaacaactaccaggctaaggaccaggaatgcaacaagttcaaccagtgtggaacatgcacggaattcaaggagtgccactacatccagaactacacgctctggaaagtgggtgactacggctccctctccggcagggagaagatgatggcggaaatctatgccaacggccccatcagctgcggtatcatggccacggagaagatggtgaactacacgggaggcatctacgcggagtaccaggatcaggcctacataaaccacgtcatttctgtggtcggctggggcgtcagcgacggcacggagtactgggttgtccggaattcgtggggggaaccgtggggggagcacggctggatgaggattgtgaccagcacctataaagacgggcagggcgccagttacaacctcgctgtcgaggacacctgtacgtttggggaccccatcgtttaagggacaggtctccccagaagagcagtgttatcgtgaaccataatcagggggtcctatcgctctgggcactgggttggttccaccatggtctgaagggactggggactggcatcaaacgtgtctgatggctgctcgcggccccgtgcgcccagaagggagaaggggcgcctgtcagcacacagcctgccgcggcgccggccgggagcgcgctcctggggaagagtctgcaatgggacggctgagagccccgggccggccactgccctgccccagtgtctgcctggccaccgtgtgatccgcaaggcccaaacgatgtgactgccaagctcctctgtccctgatttggtgtttcctgtctggcagctgtggtccatgatgtggtgcggaagcccaggcttctcaaagctcttacgttgcctgggattcggtgggggggagtcggggggtggagggagaagacggccctgtgagattgcccaagtgatgaataaagtacgtgaccccgcaaaaaaaaaaaaaaaaaaaaaaaaaaaaaaaaaaaaaaaaaaaaaaaaaaaaaaaaaaaaaaaa

SEQ ID NO: 141 - DNA, 3530 bp, Homo sapiens
  misc_feature (30)..(30): n equals a,t,g, or c
  misc_feature (59)..(59): n equals a,t,g, or c
  misc_feature (79)..(79): n equals a,t,g, or c
  misc_feature (3465)..(3465): n equals a,t,g, or c
  misc_feature (3471)..(3471): n equals a,t,g, or c
  misc_feature (3485)..(3485): n equals a,t,g, or c
  misc_feature (3487)..(3487): n equals a,t,g, or c
  misc_feature (3505)..(3505): n equals a,t,g, or c
gacatgaagccaaccggcacccggccccanatttgttataacagtactctaatttgaanccatgataaaaataaccatncatttgtaaatccacagaggaccctggtgaattcctaacacatattttctgtcttgttaagctgttgaattgcatcatggtggagaaatgtgtaaatagaagtaatgatcttggtgtttgtaaaaggggtatttgaaaggttcccgaaagtgtgagggggctgatagcagatctgcagcttctccccccgtgcactaaagccaatcataattctttctacctggtttgtgtcatcctccattaggagaccccatcttcagaaccaatggaggaagaggaagatgacgacttggagctgtttggtggctatgatagtttccggagttataacagcagtgtgggcagtgagagcagctcctatctggaggagtcaagtgaagcagaaaatgaggatcgggaagcaggggaactgccgacctccccgctgcatttgctcagccctgggactcctcgctccttggatggcagtggttctgagccagctgtctgtgagatgtgtggtatcgtgggtacaagggaagccttcttctccaagaccaagaggttctgcagcgtctcctgctccaggagctactcctccaactccaagaaagccagtatcttggctaggttacagggaaaaccaccgaccaaaaaagccaaagtcctgcacaaggctgcctggtctgccaaaattggagccttcctccactctcaagggacaggacagctggcagatgggacaccaacaggacaagacgctctggtcttgggcttcgactgggggaagttcctgaaggatcacagttacaaggctgctcccgtcagctgtttcaagcacgtcccactctatgaccagtgggaggatgtgatgaaagggatgaaggtggaggtgctcaacagtgatgctgtgctccccagccgggtgtactggatcgcctctgtcatccagacagcagggtatcgggtgctgcttcggtatgaaggctttgaaaatgacgccagccatgacttctggtgcaacctgggaacagtggatgtccaccccattggctggtgtgccatcaacagcaagatcctagtgcccccacggaccatccatgccaagttcaccgactggaagggctacctcatgaaacggctggtgggctccaggacgcttcccgtggatttccacatcaagatggtggagagcatgaagtacccctttaggcagggcatgcggctggaagtggtggacaagtcccaggtgtcacgcactcgcatggctgtggtggacacagtaatcgggggtcgcctacggctcctctacgaggatggtgacagtgacgacgacttctggtgccacatgtggagccccctgatccacccagtgggttggtcacgacgtgtgggccacggcatcaagatgtcagagaggcgaagtgacatggcccatcaccccaccttccggaagatctactgtgatgccgttccttacctcttcaagaaggtacgagcagtctacacagaaggcggttggtttgaggaagggatgaagctggaggccattgaccccctgaatctgggcaacatctgcgtggcaactgtctgtaaggttctcctggatggatacctgatgatctgtgtggacggggggccctccacagatggcttggactggttctgctaccatgcctcttcccacgccatcttcccggccaccttctgtcagaagaatgacattgagctcacaccgccaaaaggttatgaggcacagactttcaactgggagaactacttggagaagaccaagtcgaaagccgctccatcgagactctttaacatggattgcccaaaccatggcttcaaggtgggcatgaagctggaggccgtggacctgatggagccccggctcatctgtgtggccacggtgaaacgagtggtgcatcggctcctcagcatccactttgacggctgggacagcgagtacgaccagtgggtggactgcgagtccccagacatctaccccgtcggctggtgtgagctcaccggctaccagctccagcctcctgtggccgcagaaccggccacaccgctgaaggccaaagaggccacaaagaagaaaaagaaacagtttgggaagaaaaggaaaagaatcccgcccactaagacgcgacccctcagacaggggtccaagaagcccctgctggaggacgaccctcagggtgccaggaagatctcgtcggagcctgttcctggcgagatcattgctgtgcgtgtgaaggaagagcatctagacgtggcctcgcccgacaaggcttcaagtccagagctgcctgtctccgtcgagaacatcaagcaggaaacagacgactgagccttcctgcctccagcctggcttctagctggaagccagcccagcgtttctctaccaccaccaccatgcctccacctgactttggcttggagactgatcctctctgtgtaaattctgcccggtgctgtgaaggctggacggtggaggacctgctggggtctcctgggacccgcctgttgcttctgccctcccctgtggaaaggtctatatgacgggccgcctgaggccccagaactcgtctgtgaaccaccttttccagccagagttcccaaagctggaacgctagctgcctgctcttccttaagatggcctccccccgacccgccacggccctcagttgccagggatggggccaccactgtcacactgtggaatacaagacagtgaactctgtctgcctgaacgagtcatgtaaattaagttctagagcagctctctgagcaggataaggtcccctgacagtgagttgtgtggtgggggcagcctctgcctcaaaaattcaccaagcagaatgcctctcagcctcatgtgttggtcctctgctcctcctagctccccagggatgttggggacccagcttgtctcggcagctaagaagcagtgaccaggatgtggattttggcgacctgtgtggtggccttgagctgctttctgtgtttgtgaggactgactcccatttcctaaaggaaatgcccccggggaggacattgggaggaagatggcctgagtgtgcactttggctctgctacctgctcctgaagccccgctaaaaataattcatccaagattcctttgtagttaaagggtccagttctgactggagcctctagagagctgggcttgtatgttcttttggccttttgttcctacctaaatgaagaaaccatgcctggaggggccgtgaacacagaaccctcaagacaaggatgacagagctggaggacacatctagctgccattgcaacctcactgggctccccagactctgtgtgtgagaaattaaaccccctgcttgcttgagtcccgtttgttaaggattcttctattnccttgncagatttgtgttcngnaccccacccccccacctngtggtattcggttcagaaagggcca

SEQ ID NO: 142 - DNA, 1145 bp, Homo sapiens
  misc_feature (386)..(386): n equals a,t,g, or c
aattcggcacgaggacatattggccatttactctactaataaaagagtactatctactcagtgtcatttactgttactgtagtaattaatgcctttggaagaatcttttgaaatagttctcaaattggtaccactacttggtttggaattatttttttttcttttcataatcaatggttatataaatgtatattgtcctagtcagtattttatatatgctaaggactcactagctggcttggcactaatacctcaataaaaggaatacttcttttggaatcatgaaacaaaagtgartaaacctccaagttatttttccaaccaaccttctttgaaaaatcttggatgagtcactcaaatcaagacatgttataaaattatctgtnattttggtagaacatatacattgtyctaataataatttycaaatattcagtgkaacygtaagkatgagaatacaggttgaatatcycttatccaaaatgcttgggaccagaagtcttttggattycaaatttttaaatatttacatcatacttaccagtttaacatccctaattcaaaaattcaaaattcagaatgctccaataatcgtttcctttgascatcatgtcagtgctcaaaaagttgcagattttgaggtatttcagatttttgaattaggaagactcaacttgtactatcattctatagactttatgattgggtagactacatgagtattgaacccagaaatcattgtctagcaaaagccagtatagtgattaattaccctgtgactattatataatgttcaaaaaagctaacatattagaatgtccttagcgtgcagagagcaaacagagacaaaaagaaaagttaccctgaaaagtttgtcagaaaaatagaatatcagacgctraactactcatccagaattttgtcraaaaagaaaaataagataaaattcactggtagacaaaaagtagtaacataccagtttgtaatttctcagtttcaaaccatgaatatgtatttgtataccaaaaatcatttcaggagtcagagaaggaggatatgccttttatgtggagactttaaacataaaattggaaaaaaaaaaaaaaaaaaactcgtagggggggtcccgtacccaatcgtcctgt

SEQ ID NO: 143 - DNA, 2214 bp, Homo sapiens
gcagtcgcagcatgctttccgaggaagccggtgttgccgagattgccaaaatgctttggagtttttaactgaatctaagaaaagtccaaaatagatttgagactgtaaaaacagaaactgcagcaagggggattcagtgccaatgcatcaacaaaaaagacaaccagagttagtggaaggaaatcttcctgttttcgtgttccccacggagctcatattttatgcagatgatcagtcaacacataagcaagtgttgacactgtacaatccctatgagtttgccttaaagttcaaagttttgtgtactactccaaataagtatgttgtcgttgatgctgcaggtgcagtaaagcctcagtgttgtgtggatattgtgattcgtcatcgagatgttcgatcctgtcactatggtgtaatagacaaattccgtctccaagtttccgagcaaagccaaaggaaggctttggggaagaaaagaggttgttgctactcttctcccatcagcaaaagaacaacaaaaggaagaagaggaaaaaagattaaaggracatttaackgaaaktttattttttgagcagtcgtttcaaccaggtcttatcacaatggccatacttagaacatgagcaaggatttcaattgacttctgaagtaaatctgtcttgaaaatatgaatgtggactgccttttatctctatttcactccattaacatgcaacaaactattgaatgatttcaaataattgcaaatgtataatatatattttaaattataatttaatttgaaggactgcagaacattattttacagacagcaaggatgcttctgagtgacacctaggaaattatttgaagaaattctttttatatctayacctgttgtgtaagaaactttaaaacattkgttattttctcacctttttttctaattcactttgattgctaggggtcatgtatgcttcgaagttacaggactaaaagagcaaactgaccggcctaaaactaaaatgacatttattccctagctacaaacatcagcgttattatgttaattataccttgccctctatcattataaatggttgccatggtgtttctaaaaataagtgttttaccattaatgtgtagagggcaaacaaagcataaagtactaagggatcatgcttatcctagggtctcacagaagagaggacatatttaattaatcttgtgaattacagaacaggttgtggtccagacaccaagaatcataggggtttttttttaaaaaacctaatagaagtagggtgacctctctctttggtctaagagttctaaaggaaggtaggcatctgtttaattagttggttcaccctggctttacctctggttaatgctttgtgttaataggaaggaaaaatcactttatcttttcttccaagcccctccctgcctgacttacccagactgggattaccagataccaggtgatttatgtggagatgatttttcacctttaaactctaagccaagtgtaagaaactcttgatagctatgtctattttatatcagtcactgagacttttttttaagtttttatttattattaagacaactttgccaaaaaagtcccctaagcacaactatttacatttctttatagcctcttctgatctctaacacatatgcagttttaactgttattttcatagtaactgatcttttgtctaaggatttttacctgaaagcacaatgtattgagtctcttgaaaatcatctttcagatctttttacagaatgaacttatgcactgctactgtagtattctcaaggaatatatgtaaacacaaatgtatgcctgaggttggtttttgcagaaaacagtctctgcttctaaaaacttctatgtctagtcttccataggaaatcctcactgtttaaccatgtgaggagcctaagtcattaaacggatcatgtctgtacattgtgtaatgaatgaaaagcacataaatgtaatctactttgaactttgtaaaaatgatgtgtggaggctattcttgtttctccatctcaagtcctgtgtgtgcacgtgtgtgcaagtgcacatgtgtgtgtgtaataacacattgtaaagaacagaaattactttaaaaaataaacagaaatggagacctgaaaaaaaaaaaaaaaaaaaaaaaaaaaaaaaaaaaaaactcgagggggggtcccgtacccaat

SEQ ID NO: 144 - DNA, 813 bp, Homo sapiens
  misc_feature (283)..(283): n equals a,t,g, or c
  misc_feature (691)..(691): n equals a,t,g, or c
gcaggaatttctacctatatttccttccttactgtgttgtgtgtgtttgtatgtgtgtgtgtttaatttgtagcatttgccagtttctgtggtgtaaatactcccactacagctgttttcaagctaacattgtgataccacaaaaaatggaattgggaaggcacaatcaagattaacaagccagtttagaccaagacaatttttctgccctattagttgggcacaagttagaaaggctgatagtatctcatgttggaaaggtgagagagaaggccctcatgcnttattaatggcatatgcattgaagtgccctgtttgagggcatgctgttagtaacttttaaaatatgagatgtcatactttttgactgaaaatacaactcttgtaggattctattttatagaactacttaggtgcataaatatacaaaaataactgtcattgcagcattatttgtaatagtggaaacagaagacttttcattaataagagaatggttaggccagatccagtggctcacacctgtaatcccaacattttgggaatccaaggcaggaggatcgctttagcctaggagttggagaccagcatgggcaacataacaagaccttgtctctactaaaaaaaaataataataattagtctggcatggtggcacacctgtactcccagctacttgggaggctggggncaaggaggattgcttgagcccaggagattgaggctgcagtgaactgtgatcacaccactgcacaccagcctgggtgacacagcaaaactctgtctcaaaaaaaaaaaaaaaaaaaactcgta

SEQ ID NO: 145 - DNA, 1739 bp, Homo sapiens
ggcacgagagatcctcaggatatctttagccaaaggaaaagctccgcattcccacctggggggaaagctggattgccatgggcacgaagtagtggtgcagagtccctggccatcctgaatatccagaatggtgtttctgaagttcttctgcatgagtttcttctgccacctgtgtcaaggctacttcgatggccccctctacccagagatgtccaatgggactctgcaccactacttcgtgcccgatggggactatgaggagaacgatgaccccgagaagtgccagctgctcttcagggtgagtgaccacaggcgctgctcccagggggaggggagccaggttggcagcctgctgagcctcaccctgcgggaggagttcaccgtgctgggccaccaggtggaggatgctgggcgcgtgctggagggcatcagcaaaagcatctcctacgacctagacggggaagagagctatggcaagtacctgcggcgggagtcccaccagatcggggatgcctactccaactcggacaaatccctcactgagctggagagcaagttcaagcagggccaggaacaggacagccggcaggagagcaggctcaacgaggactttctgggaatgctggtccacaccaggtccctgctgaaggagacactggacatctctgtggggctcagggacaaatacgagctgctggccctcaccattaggagccatgggacccgactaggtcggctgaaaaatgattatcttaaagtataggtggaaggatacaaatgctagaaagagggaatcaaatcagccccgttttggagggtgggggacagaagatggggctacatttcccccatacctactatttttttatatcccgatttgcactttgagaatacatctaaggtcatctttcaaaagagaaaaattggacacttgagtgactttgtttttagttttgtttttgtacattatttatgtgattgttatggaattgtcacctggaaagaacaattttaagcaatgtcatttctagatgggtttctaattctgcagagacacccgtttcagccacatctaaaagagcacagtttatgtggtgcggaattaaacttccccatcctgcagattatgtggaaatacccaaagataatagtgcatagctcctttcagcctctagccttcactcctgggctccaaaagctatcccagttgcctgtttttcaaatgaggttcaaggtgctgctttgcatgcctgccaacccatggaagttgtttcttacttcttttctctcttatttattaaccatggtctgagagttgtttttgttctatgtaacagtattgccacaaaactataggcaaatcgtgtttgcagggagatttctgatgcctctgtgggtgtgtgtaagttaaagtggccacatttaagaaggccaagctttgtagtggttgcacagtcacactgatatgctgatttgctctttctcattgtatgtctatgctttgtcatcagtgctatagtaaattacaaagaaataggtagattgtatgaacatacccacaaatgcctatgatttaggttaccaatgtattctttctcatttggggttttgcttctgtctgtctgtttattggaaacttgtacttcaagtagggggaatcctaattctaataactccttagctaagttttattattcaggcaataaacatgttttcatgtaaaaaaaaaaaaaaaaaaa

SEQ ID NO: 146 - DNA, 1677 bp, Homo sapiens
  misc_feature (1012)..(1012): n equals a,t,g, or c
ggtgcagtggtgccatcacagttcactgcagccttgacctcccgggctcaagcaatcctcccacctcagccacttgagtagctgagacctcagatatgtgccatcacacccagctgattttttaaaattaattttttgtagagatagggtctcatatgttgcccatgctggtctcaaactactgggttcaaatgatcctcctgcctcagccttccaaagtactgggattacaggcatgagccaccatgccgggctgggaggcggaattttgttcagtctaaagataagctttttcatagctctggctgtagtgggagggagcagaggagtgaatgattgtcagttgggagggtgcagagtgggctcctgccctagggtgraggtragggtggcttaggtgasmcamcacagaggccctgttcagccccacgtcccctccctgtgctccctcctcctctctcctctcctgcaggcgtggraggtatcatcattcagcagatttcaccagaggcagtggaggaggcaggtacctgagccagaattcagaatgtcttattctccacttgactctgccactaacttgttgtgcaactttgggcctttccccaggccttcattttcttttcttttctttttctttytttttttttgaggcggagtctcgctatgttgcccaggctggagtgcagtggcgcagcatcatctcggctcactgcaagctccaccttctgagttcacgccattctactgcctcagcctcccgagtagccgggactgcaggcrcccaccaccacgcccggcttattttttgtatttttagtagagacagggtttcaccacgttagccaagatggtctcgatctcctgacctcgtgatccacccgcctgggcttcccaaagtgctgggattacaggcgtgagccactgcgcccggccattttcttaaatatctaataaaaaatatatagcaaatgcagtttttaaactacgacaatatgaccacgcaaaagantattatcttccaagactgctggtccaaggaaaagtcagtaataaagtggaagcattgtagcttatggaatgactggttasatttgggagaagccttagcaataatctagaatctgcatagataatacatctgaggattgggctttgtggtttacaaagcatttttttttcctcttttgatcccagccgtttgtctggactgatacaaagcatttttattagtttgtcttattcaatcctcacaccacctcaaatttacagaggatatggatctggttaatttgtatgactatgtaacctcatgtcagtccacagcactgcctggaggtgggtagaggtggtcctgggctggaatcccagccccagtgggaccttgagcaagttactttagctgtctgcacctaaatttcctcactggcaaaacaggaatactggtggttcacacctgcaattccagcactttgggaggctgaggtgggaggattgcttgagtccagaagttcaaaaccagactgggcaacatagcaagaccatctctacaaaaattaaataaataaaacatttacaagggttgtggtgaagattaaatgagatcactcacgaaaaagctcagcagaccctgatgtgcagtaggtgctcaataaatgttagccagcaaaaaaaaag

SEQ ID NO: 147 - DNA, 2648 bp, Homo sapiens
ggcacgagcttgtaggtactcattgaggtttattgtgtaagatgaatgaatgttgcaaattcctaaacatgtgattcagatgcccaatcttactctgttactttatgaaaattttttaaagctatatgatgttatatcaaaatatgttgttatactttaggataatcggtgtgttagccctgaatttcagcataagtcccatttttttccatgggagtctaggaaagctatatgtttattcagcagcaaaatacagtttggaacttaaataaactattgatcaatttctggtcttatgctagaaggaataaagcatcaagaaaaagaaaagatttgctgtcaagaccaggaaaatttgacaatagagtattagaatgcaggaaatgaggggaagtggaaaggcagcaagtaggagagaaaaagtgcagggacagtagaaagtgaatgtaggagctttctgacccatgcacttcaggaacgcaattcatccctaaaatgctgtttgctgtcttaggttgcaagtaaccaaattaaaaccagtttgaaagtagagtgagacagctgtcatcataagagtcatttgatctgtttaaaggtggctgcttgtatgcagggaccaacagtcatgtccagggcagcagctggtgcacacttcaagcacagaccataagagctaccccaggcagcacctgctaccaatagtgcaaacaactcagagagacctcgttggcataagggaatactctctcctttctgagtaaagagcaagtagaactaaaggtttcacattttaaacatactttacattcctcctcttctggggctcaagcctacttttgggccaaagcggatgttatatctgacatagagtcctcggagcagcagttgttcctgaaagttcctttttgcatctttgtgcctcatgcagtggcttacaggtcaaccagacttctcccctgacttttgatgtgtaagagcttgtgtttcaaatgggtttggttttcttaatgtcaccctaggttggtggaaaggagagtaaatggaaatggggggagcagggtcccctggggaggtttaaacagatggaagtcaattgtctcttgagaatagaggaggctattgagttttcattccacactctgctcctgttctgtcagcaaagaacaaggactactctccagcaattgctttccactggactcccccaccccggctcccacaaaaacctagggatcaacttagttcactccaaattagaaaatttaatagtcatttgtttcttcttgtccacagggagaaccattttctttccttctttcaaaattgcccaggtcttgtgaagggttattaacaccagaaagaaatacattttaataagcttaaatctcatttctacatgaaaccatcagattttagtactgcaatattttgatccctctgtcttttaggctctgacaccaaaattgccataatgaaggtgtttcacttcttctcatttatttttatgggatcttttattcccaaatgccttttcatcccagccaaagggagaaatgttgatagatctgccatcaagaaggttccaaagctggcctgtcaggttttctgtttccttgtttattatctttgaacttttgttttaaatgttttaaacacttatttaccatgtaactaaatgcctgatagcattgaaagtactttatgggttttaatttatttaatgctcatgaaaccctatgaggtaggtactgatattatttttattttactgatgaggaaagtgaagcaaagagaagtgaaatgaaaggtagtgagtgatgggaccagggtttggacatgggcagtctggctctaaaatgtatgcttttaactactatgtaatgctgcctcaccaacaacttgtctcacaaattgatattctggatcagaggatgtcgactggcctgcaaatgtattttgtatggctcatacacagttcagaagttttaaaaatttacatagaaatctgcatttcctgacttcttttgaaaatgggaataccaaacatcattaggcttgaattcccaatacggcaacaacagctgagcaacaagcagctgtttagactaggcaccttccgttcattccagcccacaatgcagatcatagtatcgacttaaatttcctgcctgccttagagaagcttctgagcttgtgacctctattctagctgctctatgaatggacgctgccccagtacagcgaggacctgctgcaaaatgcatttcttagtcttcaatacttattcctccttgtaactggatttctggtaagttatgtctcatggtggatctgccccaaagatggagactgaatggcagtgagtcactcgccctggcctccattgttctggagaaggttccagccacatggttgatgtcagctggttttccagagccagagctgggttgcaggacagacacacctgcatctaatagtgaaaggcaaagttgaaaggccaagaccagcctgaggtctgagggaccaagggcttcacagaggccagaagttcagaggtggacataaaaggtgttaggagaataaggaagtgaaaagaacatagtacagtgtatcagaggaggagctccaggctggcaaatatcactccc

SEQ ID NO: 148 - DNA, 1084 bp, Homo sapiens
ggcacgagccaccatgcccggcctagattaaaaatttgaagacatattctctactatgagccaatgaaattactcattttgtttctatcccatttgctgtcccttgcttttggaattttgtgtcttagtgtgactgtgattctttctctccttttgtctttcagcaaacggggattcagcgtccgatcctttggaacagggactcacgtgaagcttccaggaccagctcccgacaagcccaatgtttatgatttcaaaaccacatatgaccagatgtacaatgatcttcttaggaaagacaaagaactctatacacagaatgggattttacatatgctggacagaaataagagaatcaagccccggccagaaagattccagaactgcaaagacctgtttgatctgatcctcacttgcgaagagagagtgtatgaccaggtggtggaagatctgaattccagagaacaggagacctgccagcccgtgcacgtggtcaatgtggacatccaggacaaccacgaggaggccaccctgggggcgtttctcatctgtgagctctgccagtgtatccagcacacggaagacatggagaacgagatcgacgagctgctgcaggagttcgaggagaagagtggccgcacctttctgcacaccgtctgcttctactgagcccagcgcccgcatggagccgcctctggagcttcctgttgttcatactttttccttcctgacatttgtttttacttacaggtgttctgctggtgacggtagcattacccaaataaactgtgcatatgaaatgggagaggagatgccaaaacgccagatgaaagcaatcaagtttcttcttttccacttttacttatgagcgggatattgattacaaagtttttcttctttaaccaaaaaggaaagacaacggtttgtgtgcacttcccgacatacctgtgtcttcgtgtgcctgccttccctccctcctccccaccgggccggactgtacagagccctgctgcggcgtgttaggaatgacctggaattgtcaataaacagatgctgctgtcaaaaaaaaaaaaaaaaaaaaaaa

SEQ ID NO: 149 - DNA, 2072 bp, Homo sapiens
cccacgcgtccggcgttttacgcaggctgtggcagcgacgcggtccccagcctgggtaaagatggccccatggcccccgaagggcctagtcccagctgtgctctggggcctcagcctcttcctcaacctcccaggacctatctggctccagccctctccacctccccagtcttctcccccgcctcagccccatccgtgtcatacctgccggggactggttgacagctttaacaagggcctggagagaaccatccgggacaactttggaggtggaaacactgcctgggaggaagagaatttgtccaaatacaaagacagtgagacccgcctggtagaggtgctggagggtgtgtgcagcaagtcagacttcgagtgccaccgcctgctggagctgagtgaggagctggtggagagctggtggtttcacaagcagcaggaggccccggacctcttccagtggctgtgctcagattccctgaagctctgctgccccgcaggcaccttcgggccctcctgccttccctgtcctgggggaacagagaggccctgcggtggctacgggcagtgtgaaggagaagggacacgagggggcagcgggcactgtgactgccaagccggctacgggggtgaggcctgtggccagtgtggccttggctactttgaggcagaacgcaacgccagccatctggtatgttcggcttgttttggcccctgtgcccgatgctcaggacctgaggaatcaaactgtttgcaatgcaagaagggctgggccctgcatcacctcaagtgtgtagacattgatgagtgtggcacagagggagccaactgtggagctgaccaattctgcgtgaacactgagggctcctatgagtgccgagactgtgccaaggcctgcctaggctgcatgggggcagggccaggtcgctgtaagaagtgtagccctggctatcagcaggtgggctccaagtgtctcgatgtggatgagtgtgagacagaggtgtgtccgggagagaacaagcagtgtgaaaacaccgagggcggttatcgctgcatctgtgccgagggctacaagcagatggaaggcatctgtgtgaaggagcagatcccagagtcagcaggcttcttctcagagatgacagaagacgagttggtggtgctgcagcagatgttctttggcatcatcatctgtgcactggccacgctggctgctaagggcgacttggtgttcaccgccatcttcattggggctgtggcggccatgactggctactggttgtcagagcgcagtgaccgtgtgctggagggcttcatcaagggcagataatcgcggccaccacctgtaggacctcctcccacccacgctgcccccagagcttgggctgccctcctgctggacactcaggacagcttggtttatttttgagagtggggtaagcacccctacctgccttacagagcagcccaggtacccaggcccgggcagacaaggcccctggggtaaaaagtagccctgaaggtggataccatgagctcttcacctggcggggactggcaggcttcacaatgtgtgaatttcaaaagtttttccttaatggtggctgctagagctttggcccctgcttaggattaggtggtcctcacaggggtggggccatcacagctccctcctgccagctgcatgctgccagttcctgttctgtgttcaccacatccccacaccccattgccacttatttattcatctcaggaaataaagaaaggtcttggaaagttaaaaggcatcagtcttactacctgtcccaccacccccaccttagggaaatgtcctagaatcctgggaaattgagggcttctttgatggtgagtggagaaaagatagaggagaaggttgcccctgaagtgctgttaggagaaggaggatagaggaatcagccttaggagggttccatgccagctgtcatttggcaaaggaccctggacagatgacttttgcctctgaacttcactcttctctttcctcaaatgggcttcataatgctttccactcaggcttaacatgagaattaaatgag

SEQ ID NO: 150 - DNA, 1251 bp, Homo sapiens
gacccacgcgtccgagcaaacccaggaaggtgtggcgtccccgcttcgcgccaagatggtgctggtgctgcgccatcctttgtgtgcccgggaaagggcgttccgggagccgggtcgggggctcctgactcgcactgggcagcatgacggtgcgccggctgtcactgctgtgccgggacctctgggcgctgtggctgctgctgaaggccggcgcagtacgtggggcgcgggcaggtcctcgcctccccggaaggtgttgtggggcgacatgcggggacgccgggcgggggtggacgttctgggcccagccctgtcctcagaggctgctggggcagaagcccggggctgggggatgccggggatgggtgttggggtgggtgcctccgagaccagaggagccctgttccttggcagggaaggtgtgcacgggccttgcccgatggatggtttagggccatggccctggggtccctggtgagcagtggggccgcctctgcccttggcctgtgagggactgtctgtgctggtcccagaaggctgggatcacctttccactggctcctttgttcgaggtttttcatagacaggctatgtggacaaatgagggcagcgcccacgtctggctggtggaggggctgcggctcctccttggaggggacgcctggccactgctgtccccacaatggggccacccgtggtgcaaggcgtgacaagctgccctctctaggtaagcaggacttgggaggcccctggccaagcctgtggacccggctgggcggcctctgtggtctcaggtttgggtgtgtttggtctggtcagggctcaggggctgctggtccacactggccccatcctgacaattggagctttggggcaaggtccctggagaaggggtcacgtcgggaggaaacagcctgggttttgttgatgcttttctaagaatggagtactcgttttcaagagatttgtcctaattatattttccagcgggtacttatgccaagtattgatgaataattcataaaataagcatctttgtgaattttagtgaatcagaccttaactatcaacggcaatgaatgaacatctaaagtttccaattttaaagtaaagaactggctgggtacagcagttcacgcctgtaatcccagcactttgggaggccaaggctagaggatcgcttgagcccaggagtttgagatcagcctgggcaacataccaagacctcatctgttaaaaaaaaaaaaaaaa

SEQ ID NO: 151 - DNA, 1539 bp, Homo sapiens
cgatggccccgcggccgctctagaaagtcccgttttttttttttttttttttttttttttttttagagtacgttctgcattttatttytgcaggcaacactttgctcaccagcaagaacacagcccraggaagggacccaataacctttcaaaacscaaactgctkcctgcggtgagggcccagggtcctccacggagaggacaggcatcttcctttcccaccaggaaggagtcagcccggagcctctgctatgtgcaaggcggtgtgcaagcaccggctgcrgctytttgctgtctcttctttctctttggggctgggctgggtgtgcgttctggtgctgatgctttggcctgtgaggctgagcttggcacctcgacccgttcaattacagcaacgaagaagccactgctgagtgtggtctcaggggaggcccggaggcagtgctcggcacccgggaacgtgctcaggcctcggtggggccaggcaggcagggcgggagctagcctgaaggcgcccgggttctgctgcagcgcatctcgcaccacgtcttcattctcctcctggcagagggagcacgtggagtagacgagccgctgcagggaagggaaagtgagcgcgtggcacagggctcgctgctggaaccctgccagggcatgcagacgcaccgggctaggtgtgcctgccccgggctcctccagctgtctgctcggcatacccgagccactgcaggaaggatccagcaggayrtagtggacctcaygrtagcgyggatcyragggggagaccgccaggaagtcctcctcagccagytcacagcargagacgccagcccrggccagcagcgtggccatggatgccagccgcttggcatccaggtcaaaggcaaagatcttcccttggttcttcagaagagcagccaagtgactggtcttattgcctggggcggcacaggcatcgatgacatgggagcctggcggggggtccagcagcatggctgggagacagctggccctgtcctgcagaatgaggtgtccggcccggtacagtgggtgttcatgcagatctgtctgggcgggaaacaccagcagctccggcatcaaggggtccaggagaaaatgcttccccttgagggctcgtaagtcatcgaggctggaagcccgaccctgataggagaaaccttgtctcttgaaataatcaactacatcatcggagcaggtcttgagagtgttcacacgcacaaatcgaggcagctgggaggctggaccaggcctggatcccacttccaacaggtcctcattccggctcacaccccgatgaaccttgagccgagccaactcagccttgagcctcgcctggtgccggcccaacagagccttccatcggcccccaccccctcgaaagccctttcccaacaacaactcatacactagcaccttggccaggtgcggccgctctagaggatccctcgaggggcccaagcttacgcgtgcatgcgacgtcatagctctctccctagagtgagtcgaatgaggttcata

SEQ ID NO: 152 - DNA, 2077 bp, Homo sapiens
cccacgcgtccgcggacgcgtgggcggacgcgtgggtaggccgcgagcttagtcctgggagccgcctccgtcgccgccgtcagagccgccctatcagattatcttaacaagaaaaccaactggaaaaaaaaatgaaattccttatcttcgcatttttcggtggtgttcaccttttatccctgtgctctgggaaagctatatgcaagaatggcatctctaagaggacttttgaagaaataaaagaagaaatagccagctgtggagatgttgctaaagcaatcatcaacctagctgtttatggtaaagcccagaacagatcctatgagcgattggcacttctggttgatactgttggacccagactgagtggctccaagaacctagaaaaagccatccaaattatgtaccaaaacctgcagcaagatgggctggagaaagttcacctggagccagtgagaataccccactgggagaggggagaagaatcagctgtgatgctggagccaagaattcataagatagccatcctgggtcttggcagcagcattgggactcctccagaaggcattacagcagaagttctggtggtgacctctttcgatgaactgcagagaagggcctcagaagcaagagggaagattgttgtttataaccaaccttacatcaactactcaaggacggtgcaataccgaacgcagggggcggtggaagctgccaaggttggggctttggcatctctcattcgatccgtggcctccttctccatctacagtcctcacacaggtattcaggaataccaggatggcgtgcccaagattccaacagcctgtattacggtggaagatgcagaaatgatgtcaagaatggcttctcatgggatcaaaattgtcattcagctaaagatgggggcaaagacctacccagatactgattccttcaacactgtagcagagatcactgggagcaaatatccagaacaggttgtactggtcagtggacatctggacagctgggatgttgggcagggtgccatggatgatggcggtggagcctttatatcatgggaagcactctcacttattaaagatcttgggctgcgtccaaagaggactctgcggctggtgctctggactgcagaagaacaaggtggagttggtgccttccagtattatcagttacacaaggtaaatatttccaactacagtctggtgatggagtctgacgcaggaaccttcttacccactgggctgcaattcactggcagtgaaaaggccagggccatcatggaggaggttatgagcctgctgcagcccctcaatatcactcaggtcctgagccatggagaagggacagacatcaacttttggatccaagctggagtgcctggagccagtctacttgatgacttatacaagtatttcttcttccatcactcccacggagacaccatgactgtcatggatccaaagcagatgaatgttgctgctgctgtttgggctgttgtttcttatgttgttgcagacatggaagaaatgctgcctaggtcctagaaacagtaagaaagaaacgttttcatgcttctggccaggaatcctgggtctgcaactttggaaaactcctcttcacataacaatttcatccaattcatcttcaaagcacaactctatttcatgctttctgttattatctttcttgatactttccaaattctctgattctagaaaaaggaatcattctcccctccctcccaccacatagaatcaacatatggtagggattacagtgggggcatttctttatatcacctcttaaaaacattgtttccactttaaaagtaaacacttaataaatttttggaagatctctgatttttatgtgttcatttatgaacattaaatatgaaaatattatggtttatattatttattgaaggagtagaggaattactcaactttagtatgctcttaattgaatatatggaggcatttgactttctaatttgtatatttttatattatgtgaattttaaaaatgagctttggaattttttaatttatagaaaaaaaaaaaaaaaaaa

SEQ ID NO: 153 - DNA, 2108 bp, Homo sapiens
ggcacgagggagacctaaacacagtcaccatgaagctgggctgtgtcctcatggcctgggccctctacctttcccttggtgtgctctgggtggcccagatgctactggctgccagttttgagacgctgcagtgtgagggacctgtctgcactgaggagagcagctgccacacggaggatgacttgactgatgcaagggaagctggcttccaggtcaaggcctacactttcagtgaacccttccacctgattgtttcctatgactggctgatcctccaaggtccagccaagccagtttttgaaggggacctgctggttctgcgctgccaggcctggcaagactggccactgactcaggtgaccttctaccgagatggctcagctctgggtccccccgggcctaacagggaattctccatcaccgtggtacaaaaggcagacagcgggcactaccactgcagtggcatcttccagagccctggtcctgggatcccagaaacagcatctgttgtggctatcacagtccaagaactgtttccagcgccaattctcagagctgtaccctcagctgaaccccaagcaggaggccccatgaccctgagttgtcagacaaagttgcccctgcagaggtcagctgcccgcctcctcttctccttctacaaggatggaaggatagtgcaaagcagggggctctcctcagaattccagatccccacagcttcagaagatcactccgggtcatactggtgtgaggcagccactgaggacaaccaagtttggaaacagagcccccagctagagatcagagtgcagggtgcttccagctctgctgcacctcccacattgaatccagctcctcagaaatcagctgctccaggaactgctcctgaggaggcccctgggcctctgcctccgccaccaaccccatcttctgaggatccaggcttttcttctcctctggggatgccagatcctcatctgtatcaccagatgggccttcttctcaaacacatgcaggatgtgagagtcctcctcggtcacctgctcatggagttgagggaattatctggccaccggaagcctgggaccacaaaggctactgctgaatagaagtaaacagttcatccatgatctcacttaaccaccccaataaatctgattctttattttctcttcctgtcctgcacatatgcataagtacttttacaagttgtcccagtgttttgttagaataatgtagttaggtgagtgtaaataaatttatataaagtgagaattagagtttagctataattgtgtattctctcttaacacaacagaattctgctgtctagatcaggaatttctatctgttatatcgaccagaatgttgtgatttaaagagaactaatggaagtggattgaatacagcagtctcaactgggggcaattttgccccccagaggacattgggcaatgtttggagacattttggtcattatacttggggggttgggggatggtgggatgtgtgtgctactggcatccagtaaatagaagccaggggtgccgctaaacatcctataatgcacagggcagtaccccacaacgaaaaataatctggcccaaaatgtcagttgtactgagtttgagaaaccccagcctaatgaaaccctaggtgttgggctctggaatgggactttgtcccttctaattattatctctttccagcctcattcagctattcttactgacataccagtctttagctggtgctatggtctgttctttagttctagtttgtatcccctcaaaagccattatgttgaaatcctaatccccaaggtgatggcattaagaagtgggcctttgggaagtgattagatcaggagtgcagagccctcatgattaggattagtgcccttatttaaaaaggccccagagagctaactcacccttccaccatatgaggacgtggcaagaagatgacatgtatgagaaccaaaaaacagctgtcgccaaacaccgactctgtcgttgccttgatcttgaacttccagcctccagaactatgagaaataaaattctgttgtttgtaagctaaaaaaaaaaaaaaaaaaaaaaaaaaaa

SEQ ID NO: 154 - DNA, 1146 bp, Homo sapiens
  misc_feature (5)..(5): n equals a,t,g, or c
  misc_feature (857)..(857): n equals a,t,g, or c
tccancattatgggatacattgatgatccagacaaatatcatcagggttttgaattgttgctgtcagccttgggtgatccctcagaaagagtagttagtgctacacatcaagtatttttaccagcttacgctgcgtggactacagaacttggaaatttacagtctcatcttatacttacactactgaacaagattgaaaaacttctcagggaaggagaacatggactggatgaacacaaactccacatgtatctttctgccttgcagtccttgatcccatctctctttgcattagtgctacagaatgcacctttctccagcaaagccaagcttcatggtgaagtgccacagatagaagtgactaggtttcctcggcctatgtcgcctcttcaagatgtgtccactattatcggaagtcgtgagcaattggcagtgctgctgcaactttatgactaccagctagaacaagagggtacaacaggctgggagagtttactgtgggttgtcaatcaattgttgccacaacttatagaaatagttggcaaaattaatgttacttcaactgcctgtgtccatgaattctccagatttttctggcgcctttgccggacatttggcaaaatttttacaaacactaaggtaaaacctcagttccaggagattttaagactatctgaagaaaacattgattcctcagcaggaaatggggtcctcactaaagctacagtccccatttatgcaacaggagtccttacgtgttatattcaggaagaagaccgaaaactgttagttggattcttagaagatgtaatgacgctgctttcattatctcatgctcctcttgatagcctgaaggnttcttttgtggaattgggtgcaaaccaggcctaccatgagttactattaactgttttgkggtatggkgtkgkccatacttcagcactcgtgaggtgtactgctgctagaatgtttgagctgttggtgaagggggtgaatgaaactctggtagctcagagggttgttcctgctctcattactctctccagtgaccctgaaatctctgtcaggattgccacaattccagcctttggsactattatggaaacagtaattcaaagagagttgctggaaagagtgaaaatgcag

SEQ ID NO: 155 - DNA, 1998 bp, Homo sapiens
ggcacgagaacaatttcccttgtacataatatacttatgtacttataccattgactctgtaagataaaagtcttagaaatggggttgccaagtcaaagggtctatgcatttaacacagggaatgagtactgtcacgtggcttctgaaactgtttacccagtttatgttcccaccaacagtgtctaattcccatacctgtgctaggtattatgtctttaatttttgtctgattatttcatttaattttaatttccattatcactggtgaggttgggcttctgttcagtttttttgtcatttatgtttcttttgtgaattgccttttcctatgctttgtgcatttttctcttggggtttgtctttttaaaattgatatacaggtgttctctataatatagatattctgccactatatgcaaatgatcttccaatttatttatttatttgaaacagagtttcactcttgtcaccaggttggagtgcagaggtgcgatcttggctcactgcaacctccacctcccaagttcaagcgattttcctgcctcagcctccctagtaactgggattacaggtgccctgccaccatgcccggctaatttttgtatttttggtagagacggggttttgccatgttggccaggctggcctcgaactcctgacttcaggtgatctgcccacctcagcctcccaaagtgctgggattacaggcctgagctaccgcaccggccccaatttatttcttttaacttagtttatggtgcctttagctgtacaaaagttactaatttttagtcaaatatccagcttttcctttagggcttcttatatgtcctgatccaaggattattttttaaaaattcttccgtattttctcctataatattcataggttactttacaattagatttttaatacatctcctaactttttcatatagtatgaggtatccatttttaaaaaatggatatccagttgtgcccatatgtcttttccactcatctgaaatgccaccattatcatattttcaattttcatgtgcacgtgggtctgttttcaaacttggagattctcttccactgatatatgtctattcttgtgccagtggtttaactgctattgctttatagtatattttgatatcttcttttcaaaaggatactcttgtgtattctttttttcatcttgtgtattctcatccattttccagaaaaccacagaatcaactttaagtttcatttcattaagtcagattagtgagagctgattttctgtgtatcatgttcattcagaaacatagtctatctctccatttaggggcacttgttttatattttctttctaacacgtattttgttgggtttattgtaccttttttttttttaacttcagattcaggggggtgcacgtgcaggtttgttacctgagtatacgatatgatactgaggttggagtatgaatgatgccattacccaggtactgggcataatacccaatagttagtttttcaacccttgcccttctccctctctcctccctctagtagtccccagtttctaatactgccatctccatgttcatgagaacccagtgtttagctcccacttataagtgagagcatgttgcatttggttttctgttcctgccatatcctttgtagggacatggatgaaattggaaaacatcattctcagtaaactatcgcaagaacaaaaaaccaaacaccacatattctcactcataggtgggaattgacaatgggaacacatggacacaggaaggggaacatcacactctggggactgttgtggggttggcggaggggggagggatagcattgggagatatacctaatgctagatgacgagttagtgggtgcagtgcagcagcatggcacatgtatacatatgtaactaacctgcacaatgtgcacatgtaccctaaaacttaaagtataatataaaaaaaaaaaagaacaaaacttaaaaaaaaaaaaaaaa

SEQ ID NO: 156 - DNA, 970 bp, Homo sapiens
ctcgtgccgaattcggcacgaggtgcccaggctctcagggcagagggtccagtgtgatcactttgcatggcctctctcccctcctgagcttgtgccagggccccagggctgacctggagaggaaaawggcagagggtgaagatggggtgtctggtttggggaccatcctggccccccttgtcactgttggcatctcttctgcacagtggcattgctgggaggtgcttactgtgcctattcaaggggctggcagccgcagcctcactgcagatcagggacttggcttcccggttgaccacaggtccaagaacctgcagggtccagcctcccccccatccccagtcttccccaccctggcccggccctccaggtgcagaaacatgcaggcccctctccaggactgtgggaggagtgtgtccctcagactggcctgtgtcctggctcctcttaccacctcttccagaggttgtcacctgcagctgccccaggataaaggcaaggccagagaggactcctgaactcctgtgtgcctggggtggcaggggcaaacatagccaactggtggcctgagcggggccatggtgargacacccttggtggcttgtcccacatcaagctgggargtgacactgaggatgcattagtctgcagcgtatgataaaaacggcatttcaggccaggcgtggtggctcatgcctgtcaccccagcaccttgggaggccgaggtgggcagatcacatgaggtcaggactttgagaccagcctggccaacatggtgaaaactcatctgtactaaaaaaacaaaaattatgtgggttggtggtgtgtgcctgtaatcccagctacttgggaggctgaggcaggagaatcacttgaacctgggaggcggaggctacaacgagccgagattgcaccactgcactccagcctgatccgtctcaaaaaaaaaaaaaaaaaaaaaaaaactcga

SEQ ID NO: 157 - DNA, 1782 bp, Homo sapiens
tgccgagcctctttggtagcaggaggctggaagaaaggacagaagtagctctggctgtgatggggatcttactgggcctgctactcctggggcacctaacagtggacacttatggccgtcccatcctggaagtgccagagagtgtaacaggaccttggaaaggggatgtgaatcttccctgcacctatgaccccctgcaaggctacacccaagtcttggtgaagtggctggtacaacgtggctcagaccctgtcaccatctttctacgtgactcttctggagaccatatccagcaggcaaagtaccagggccgcctgcatgtgagccacaaggttccaggagatgtatccctccaattgagcaccctggagatggatgaccggagccactacacgtgtgaagtcacctggcagactcctgatggcaaccaagtcgtgagagataagattactgagctccgtgtccagaaactctctgtctccaagcccacagtgacaactggcagcggttatggcttcacggtgccccagggaatgaggattagccttcaatgccaggctcggggttctcctcccatcagttatatttggtataagcaacagactaataaccaggaacccatcaaagtagcaaccctaagtaccttactcttcaagcctgcggtgatagccgactcaggctcctatttctgcactgccaagggccaggttggctctgagcagcacagcgacattgtgaagtttgtggtcaaagactcctcaaagctactcaagaccaagactgaggcacctacaaccatgacataccccttgaaagcaacatctacagtgaagcagtcctgggactggaccactgacatggatggctaccttggagagaccagtgctgggccaggaaagagcctgcctgtctttgccatcatcctcatcatctccttgtgctgtatggtggtttttaccatggcctatatcatgctctgtcggaagacatcccaacaagagcatgtctacgaagcagccagggcacatgccagagaggccaacgactctggagaaaccatgagggtggccatcttcgcaagtggctgctccagtgatgagccaacttcccagaatctgggcaacaactactctgatgagccctgcataggacaggagtaccagatcatcgcccagatcaatggcaactacgcccgcctgctggacacagttcctctggattatgagtttctggccactgagggcaaaagtgtctgttaaaaatgccccattaggccaggatctgctgacataattgcctagtcagtccttgccttctgcatggccttcttccctgctacctctcttcctggatagcccaaagtgtccgcctaccaacactggagccgctgggagtcactggctttgccctggaatttgccagatgcatctcaagtaagccagctgctggatttggctctgggcccttctagtatctctgccgggggcttctggtactcctctctaaataccagagggaagatgcccatagcactaggacttggtcatcatgcctacagacactattcaactttggcatcttgccaccagaagacccgagggaggctcagctctgccagctcagaggaccagctatatccaggatcatttctctttcttcagggccagacagcttttaattgaaattgttatttcacaggccagggttcagttctgctcctccactataagtctaatgttctgactctctcctggtgctcaataaatatctaatcataacagc

SEQ ID NO: 158 - DNA, 1205 bp, Homo sapiens
ggcagagcttttgtgcagcaccctttaaagggtgactcgtcccacttgtgttctctctcctggtgcagagttgcaagcaagtttatcggagtatcgccatgaagttcgtcccctgcctcctgctggtgaccttgtcctgcctggggactttgggtcaggccccgaggcaaaagcaaggaagcactggggaggaattccatttccagactggagggagagattcctgcactatgcgtcccagcagcttggggcaaggtgctggagaagtctggcttcgcgtcgactgccgcaacacagaccagacctactggtgtgagtacagggggcagcccagcatgtgccaggctttcgctgctgaccccaaatcttactggaatcaagccctgcaggagctgaggcgccttcaccatgcgtgccagggggccccggtgcttaggccatccgtgtgcagggaggctggaccccaggcccatatgcagcaggtgacttccagcctcaagggcagcccagagcccaaccagcagcctgaggctgggacgccatctctgaggcccaaggccacagtgaaactcacagaagcaacacagctgggaaaggactcgatggaagagctgggaaaagccaaacccaccacccgacccacagccaaacctacccagcctggacccaggcccggagggaatgaggaagcaaagaagaaggcctgggaacattgttggaaacccttccaggccctgtgcgcctttctcatcagcttcttccgagggtgacaggtgaaagacccctacagatctgacctctccctgacagacaaccatctctttttatattatgccgctttcaatccaacgttctcacactggaagaagagagtttctaatcagatgcaacggcccaaattcttgatctgcagcttctctgaagtttggaaaagaaaccttcctttctggagtttgcagagttcagcaatatgatagggaacaggtgctgatgggcccaagagtgacaagcatacacaactacttattatctgtagaagttttgctttgttgatctgagccttctatgaaagtttaaatatgtaacgcattcatgaatttccagtgttcagtaaatagcagctatgtgtgtgcaaaataaaagaatgatttcagaaaaaaaaaaaaaaaaaaactcggggggggccggtacccattygccccaag

SEQ ID NO: 159 - DNA, 809 bp, Homo sapiens
ggcacgaggagaatcatgggcctctggctgggcatgctggcctgtgtcttcctggcaactgctgcctttgttgcttatactgcccggctggactggaagcttgctgcagaggaggctaagaaacattcaggccggcagcagcagcagagagcagagagcactgcaaccagacctgggcctgagaaagcagtcctatcttcagtggctacaggcagttcccctggcattaccttgacaacgtattcaaggtctgagtgccacgtggacttcttcaggactccagaggaggcccacgccctttcagctcctaccagcagactatcagtgaaacagctggtcatccgccgtggggctgctctgggggcggcgtcagccacactgatggtggggctcacggtcaggatcctagccaccaggcactagcaaagaagcttggaaatagaaagccaggagtggctgtccccagtatgcaaacacaccacggtctgccctgcaaaaacaccaatggggtctagtgcaggtggacactttgaaccactcctcaaaaaaagaactttggctgattccttgtggtgacactcagaggggtctgaacagacttgacaattctgttctggtcaagctggagttttcttctgtgacttggactgctctacagaagacatcagccaactgcacgagtcagagtccagggattgtcactattattaataatgtaaatggcttcaaatgggacactgcagataaaatcacaaaaaccactgttatattaaagattacacatttcctggaaaaaaaaaaaaaaaaaa

SEQ ID NO: 160 - DNA, 1151 bp, Homo sapiens
ggcacgagtgtcaatgaaagtgtttctaatgcaactgcgattgactcccagatagctagaagtttgcacatcccactcacccaggatatagctggtgacccaagctatgaaattagcaaacagagactcagtattgtcattggcgtggttgctggcattatgacggtgattctaatcatcttaattgtagtgatggcaaggtactgcaggtccaaaaataaaaatggctatgaagccggcaaaaaagatcacgaagacttttttacaccccaacagcatgacaaatctaaaaagcctaaaaaggacaagaaaaacaaaaaatctaagcagcctctctacagcagcattgtcactgtggaggcttctaagccaaatggacagaggtatgatagtgtcaatgagaagctgtcagacagcccaagcatggggcgatacaggtccgttaatggtgggcccggcagtcctgacctggcaaggcattacaaatctagttccccattgcctactgttcagcttcatccccagtcaccaactgcaggaaaaaaacaccaggccgtacaagatctaccaccagccaacacatttgtgggagcaggagacaacatttcaattggatcagatcactgctctgagtacagctgtcaaaccaataacaagtacagcaaacagatgcgtctacatccatacattactgtgtttggctgaattccactctaatatgatgctccattatgcaccatactgtgatgacctttctactccgaaacctgctggagcctgcccttggccgtggggtgtcagccaatcactgcttgttccacttgttgtacattttatttttgagtctttttctttctcatatacagaaaaatagtatgaaaataaaataaatgtatgaaacagtattaatgcagaaatgtgctactaatggatgtctgagtcaccagaaattccattcttaaagaggcggttagcacctattagacgtaacagtgatgtcttttaaaaaatccaaaagcatattgcaacaataagtttgagactttgtgtgaacaaagggaaattcagcctcttatgtctttgtctttaatacattaaatactgattttgaataaaaatctaaattgatcaataaaaaaaaaaaaaaaaaa

SEQ ID NO: 161 - DNA, 1303 bp, Homo sapiens
aggttaaatgcgtacttttctaacctttgttattttgaaagttattctgatattcctatccagttgtgcctcatttactagaaatttgctcacatggccaaatgatgtatccacagaacaatttgaaactagaccttttggaagcgaactcctacaaactgtcatcaatgttagcagaacttgagcaaagacctcaacccagccatccttgtagtaattccatcttcaggtggagggaaaaggtaacatttaaggagactggttgtaatttcttgattgggcctgctgggtggagtggcttaaagtagcatcagggcaaaaaaggtgttaggaattctatgtgatattaatattcatgcagttagttaagaagataaatgttttwatttttcttttgagcacaataacaagagctagacaaaaccgaatacattctgtgtacaccaaacttctatgagaagctaaaaaacacttttgatttcttctttctcatcatacctgaatttcatcctttggatgtgcttttacagtaaaatttctattaaattgaaattttaatattcgttcagacctaaattataagattttgtggtatgtattagtctcatctgtttaagatggtgcctaatgcagataatgcatcagtacagctctgaaatgcttgtagctatttttattactgatcagaagggggaactgtaatcatcttgtgaagggacagttttctaaggctcaagagctcgaaaacaatctcaatcatttacagggttgtgatcatttcacttgcattaagccaactaaagttgtatttgtaaaagtaatgctatgaatattactatttgacctagacacataggttagaattggaaacacaggctataaagtatagtaattgtgtaattgtgaaaatattaaggcttcaactcaaaactgaaacacagtagggcttagaaatctttgaattatttatacccctcagtttaaaaacttccagtccaggcgcagtggctcatgcctgtaatcccagaactttgggaggccaaggcaggcggatcacctgaggtcaggagttcgagagcagcctggctgacacggtgaaaccccgtctctactaagaatacaaaaattagccaggcatggtggtgggcacctgtaatcccagctacgggggaggctgaggcaggagaatcacttgaacccgggaggtggaggttgtagtgggccaagatcatgccactgcactccagcctgggtgaacagggcaagactctgtctaaaaaaaaaaaaaaaaaaaactcgtagg

SEQ ID NO: 162 - DNA, 4412 bp, Homo sapiens
aacattagatctcaatgaaaaccagaatggaaccctttcactatcataaactcatttataaaagtgcccatgatgaatagcaagaagtacccagtggcccatctcattgaccaaacttagaaagccaaggtggggcatctgcagctctcccacaatctgagtttgtgttgatccttgtaccccacaacctgaaacatcttcttatatatatcgagcgagctctcagcccttctgttttcaaggccatcatggagaaactggagatgtccaagttccagcccactctcctaacactaccccgcatcaaagagactaagccagactatgggggaaagggagataagaaggatcctggaactttaaagagggaaagagtgagattcagaaatcgccaggactggactttaagggacgtcctgtgtcagcacaagggactggcacacacagacacacgagaccgaggagaaactgcagacaaatggagatacaaagacttagaaggacagctcctttcacctcatcctacttgtccagaaggtaaaaagacacagccagaaagaaaaggcatcggctcagctctcagatcaggacaggctgtggatctgtggcggtactctgaaagctggagctgcagcacaccccttttgtattgctcaccctcggtaaagagagagagggctgggaggaaaagtagttcatctaggaaactgtcctgggaaccaaacttctgatttcttttgcaaccctctgcattccatctctatgagccaccattggattacacaatgacatggagaatgggaccccgtttcactatgctgttggccatgtggctagtgtgtggatcagaaccccacccccatgccactattagaggcagccacggaggacggaaagtgcctttggtttctccggacagcagtaggccagctcggtttctgaggcacactgggaggtctcgcggaattgagagatccactctggaggaaccaaaccttcagcctctccagagaaggaggagtgtgcccgtgttgagactagctcgcccaacagagccgccagcccgctcggacatcaatggggccgccgtgagacctgagcaaagaccagcagccaggggctctccgcgtgagatgatcagagatgaggggtcctcagctcggtcaagaatgttgcgtttcccttcggggtccagctctcccaacatccttgccagctttgcagggaagaacagagtatgggtcatctcagcccctcatgcctcggaaggctactaccgcctcatgatgagcctgctgaaggacgatgtgtactgtgagctggcggagaggcacatccaacagattgtgctcttccaccaggcaggtgaggaaggaggcaaggtgagaaggatcaccagcgagggccagatcctggagcagcccctggaccctagcctcatccctaagctgatgagcttcctgaagctggagaagggcaagtttggcatggtgctgctgaagaagacgctgcaggtggaggagcgctatccatatcccgttaggctggaagccatgtacgaggtcatcgaccaaggccccatccgtaggatcgagaagatcaggcagaagggctttgtccagaaatgtaaggcctctggtgtagagggccaggtggtggcggaggggaatgacggtggagggggagcaggaaggccaagcctgggcagcgagaagaagaaagaggacccaaggagagcacaagtcccaccaaccagagagagtcgggtgaaggtcctgagaaaactggccgccactgcaccagctttgccccaacctccctcaacccccagagccaccacccttcctcctgccccagccacaacagtgactcggtccacgtcccgggcggtaacagttgctgcaagacctatgaccaccactgcctttcccaccacgcagaggccctggaccccctcaccctcccacaggccccctacaaccactgaggtgatcactgccaggagaccctcagtttcagagaatctttaccctccatcccggaaggatcagcacagggagaggccacagacaaccaggaggcccagcaaggccaccagcttggagagcttcacaaatgcccctcccaccaccatctcagaacccagcacaagggctgctggcccaggccgtttccgggacaaccgcatggacaggcgggaacatggccaccgagacccaaatgtggtgccaggtcctcccaagccagcaaaggagaaacctcccaaaaagaaggcccaggacaaaattcttagtaatgagtatgaggagaagtatgacctcagccggcctactgcctctcagctggaggacgagctgcaggtggggaatgttccccttaaaaaagcaaaggagtctaaaaagcatgaaaagcttgagaaaccagagaaggagaagaaaaaaaagatgaagaatgagaacgcagacaagttacttaagagtgaaaagcaaatgaagaagtctgagaaaaagagcaagcaagagaaagagaagagcaagaagaaaaaaggaggtaaaacagaacaggatggctatcagaaacccaccaacaaacacttcacgcagagtcccaagaagtcagtggccgacctgctggggtcctttgaaggcaaacgaagactccttctgatcactgctcccaaggctgagaacaatatgtatgtgcaacaacgtgatgaatatctggaaagtttctgcaagatggctaccaggaaaatctctgtgatcaccatcttcggccctgtcaacaacagcaccatgaaaatcgaccactttcagctagataatgagaagcccatgcgagtggtggatgatgaagacttggtagaccagcgtctcatcagcgagctgaggaaagagtacggaatgacctacaatgacttcttcatggtgctaacagatgtggatctgagagtcaagcaatactatgaggtaccaataacaatgaagtctgtgtttgatctgatcgatactttccagtcccgaatcaaagatatggagaagcagaagaaggagggcattgtttgcaaagaggacaaaaagcagtccctggagaacttcctatccaggttccggtggaggaggaggttgctggtgatctctgctcctaacgatgaagactgggcctattcacagcagctctctgccctcagtggtcaggcgtgcaattttggtctgcgccacataaccattctgaagcttttaggcgttggagaggaagttgggggagtgttagaactgttcccaattaatgggagctctgttgttgagcgagaagacgtaccagcccatttggtgaaagacattcgtaactattttcaagtgagcccggagtacttctccatgcttctagtcggaaaagacggaaatgtcaaatcctggtatccttccccaatgtggtccatggtgattgtgtacgatttaattgattcgatgcaacttcggagacaggaaatggcgattcagcagtcactggggatgcgctgcccagaagatgagtatgcaggctatggttaccatagttaccaccaaggataccaggatggttaccaggatgactaccgtcatcatgagagttatcaccatggatacccttactgagcagaaatatgtaaccttagactcagccagtttcctctgcagctgctaaaactacatgtggccagctccattcttccacactgcgtactacatttcctgcctttttctttcagtgtttttctaagactaaataaatagcaaactttcacctattcatgagttattattgaaacctcaaatcataaagacatttaaaagaattgtttttctaactggaggggctctagtgctaaataatagtactgaaaattgatattattttccttttcttatatgaaggaccttatttggcatataaaattttataaaatatgtatttaaagctttttcttattttttgtattaattggtaagtgaaaactctgttaaagatcacaccacaatgttttcaagaaacatctgaaaagataaaacaaagaacaaataacttataatacttacttaaattgacactttttgaaatgccagtctgaaaataattaagatatctctgctttgtatgagtttcttttatgaaacttgataccacgggagtccagtaatattggccacaaaagccagagaaagtaccaagcccagctttgttatcatagccacttcctgccctgcttctgttatttttagtgttttttcagatataaatcggggtccaggaaatcctcaccagaatctggcactgcagccaaaggcgatacttccagagttctagtaggctgctatggaatttctggcatgaaaattcttgacccctcacactttaccccctgtacagca

SEQ ID NO: 163 - DNA, 1907 bp, Homo sapiens
ggcacaggggaatcatcgtgtgatgtgtgtgctgcctttgtgagtgtgtggagtcctgctcaggtgttaggtacagtgtgtttgatcgtggtggcttgaggggaacccttgttcagagctgtgactgcggctgcactcagagaagctgcccttggctgctcgtagcgccgggccttctctcctcgtcatcatccagagcagccagtgtccgggaggcagaaggtaccggggcagctactggaggactgtgcgggcctgcctgggctgccccctccgccgtggggccctgttgctgctgtccatctatttctactactccctcccaaatgcggtcggcccgcccttcacttggatgcttgccctcctgggcctctcgcaggcactgaacatcctcctgggcctcaagggcctggccccagctgagatctctgcagtgtgtgaaaaagggaatttcaacgtggcccatgggctggcatggtcatattacatcggatatctgcggctgatcctgccagagctccaggcccggattcgaacttacaatcagcattacaacaacctgctacggggtgcagtgagccagcggctgtatattctcctcccattggactgtggggtgcctgataacctgagtatggctgaccccaacattcgcttcctggataaactgccccagcagaccggtgaccgtgctggcatcaaggatcgggtttacagcaacagcatctatgagcttctggagaacgggcagcgggcgggcacctgtgtcctggagtacgccacccccttgcagactttgtttgccatgtcacaatacagtcaagctggctttagcggggaggataggcttgagcaggccaaactcttctgccggacacttgaggacatcctggcagatgcccctgagtctcagaacaactgccgcctcattgcctaccaggaacctgcagatgacagcagcttctcgctgtcccaggaggttctccggcacctgcggcaggaggaaaaggaagaggttactgtgggcagcttgaagacctcagcggtgcccagtacctccacgatgtcccaagagcctgagctcctcatcagtggaatggaaaagcccctccctctccgcacggatttctcttgagacccagggtcaccaggccagagcctccagtggtctccaagcctctggactgggggctctcttcagtggctgaatgtccagcagagctatttccttccacagggggccttgcagggaagggtccaggacttgacatcttaagatgcgtcttgtccccttgggccagtcatttcccctctctgagcctcggtgtcttcaacctgtgaaatgggatcataatcactgccttacctccctcacggttgttgtgaggactgagtgtgtggaagtttttcataaactttggatgctagtgtacttagggggtgtgccaggtgtctttcatggggccttccagacccactccccacccttctccccttcctttgcccggggacgccgaactctctcaatggtatcaacaggctccttcgccctctggctcctggtcatgttccattattggggagccccagcagaagaatggagaggaggaggaggctgagtttggggtattgaatcccccggctcccaccctgcagcatcaaggttgctatggactctcctgccgggcaactcttgcgtaatcatgactatctctaggattctggcaccacttccttccctggccccttaagcctagctgtgtatcggcacccccaccccactagagtactccctctcacttgcggtttccttatactccacccctttctcaacggtccttttttaaagcacatctcagattaaaaaaaaaaaaaaaaaaaaaaaaaaaaaaaaaaagggcggccgc

SEQ ID NO: 164 - DNA, 861 bp, Homo sapiens
gaattcggcacgagcctgagtcaacttgatatccaagctttttacttcaattatctggcaagattacatagactgtcaaagtttgtgaaagtttagcaagaaaactgtcttactcacagaaccacaggactaactgactgaaccacactccaccatttgcccctatttccaggcgttatggtcaccctgtagtttctaatctgtatagatgtgtagagcatgcctcttccctcttcctttcccctccctgttttcctttcctcttgccctttcttaatgtctgtytctattggcttcttgatcttggtctttaatgttcatccttaagcttgcttctctcttcagactactgattcagcctcttgcattttctttcaacttgggccaaaaaaacaggcaacattttcttcctccactacctcatcatcatccaatttattcctttagtttatattaccacaactctcctaaacgtcccaagtctattattaagtctaacaacttagcttcgaacctcaatccaagcatctgacaacacactgaaatgtgcaagcaagagtcccwatggccgggtgcagtggctcatgcctgtaatcccagcactttgggaggccaaggtgggatcacctgaggtcgggagttcgggaccagcctggccagtatggtgaagccatgtctmwactaaaaatacaaaattagccggacattgtggtgcacgtctgtcatcccagcaaggcaggcgaatcgcttgaacccgggaggcggaggttgcggtgagccgggatcgtgccattgcactccagcctggtcaacagagcgagactccgcctcattaaaaaaaaaaaaaaaaaaaactcgtag

SEQ ID NO: 165 - DNA, 587 bp, Homo sapiens
  misc_feature (1)..(1): n equals a,t,g, or c
  misc_feature (587)..(587): n equals a,t,g, or c
natttctcacaatgacaaattctcaaatattgctaatagtactgtggattttcctacattggtaaattgaaggaattgctaaatgctgaattcagcaaccagtttgagattgttgaaaataaagattgtttctttttcaatgcaagttcacagatcactggagttctagctacagtttgttctagaccagaggttgcagatatttttgtcctataaagagacacatggttaatatttttggctttgtgagttgtatagttttccgttgtagctgttcagctctgctacatgaaagcaaccatagaccataccttaacaagtggtcacttttgagtaccaataaaactttatttagaaataacagagggctggatttggtcctagtttgctgaacccttttctagatgaaggctcctcttgccaagactggctccctaccttggctgacaaattctcactttgggacttagtcattgttgctgctctctgttattttgcatgtcttttctcatgtttaggtgctgtgtcttaatacttttttcttacatttaatttaacaatcattactgagcgctggtatgtctagn

SEQ ID NO: 166 - DNA, 477 bp, Homo sapiens
gaattcggcacgaggtgagtatggcttttgtcttccatcttgctcagggtactttggaaccgctatacattgcaggagcttagcttctggttaccatggtttgcttccagagcaacaagcctagtacttcaacatggagacaattatcttttgtttttgttttgttttgtttgttttgtcttggccatgcctttttgagtttacctttttatattttgtccatcattgccatgtgtttggagcagtgggcgttccataacatgaactcactgtaccatcacgaatgggaagtaaggggaaaccttatccatgtggattttactcttccctgattccctaaattgggtttgcaaaatactactgtgcactttcttgatgattcgggcttatctttatgactgtctgtktttgtgtcagactgtaaagaagtataaaagtctttagcttgaaaaaaaaaaaaaaaaaaaaaaaactcga

SEQ ID NO: 167 - DNA, 1930 bp, Homo sapiens
ggcacgagcagaaatgaaaaattacttgagtgggatgagtaggaaaaaaagtggtagtgtcattcaattccagaggaagagatgaatttaatggtgaggttactggcattgggactaatatcagggatgatgtctaatattactcaatcacattcaagtaaaatatcagcctttggtatcttcattggaccagaacagtttctttagatcttcttatttctctttcaagcttcaaccttaaataataggccattgtgtagcagaaaaaactttaaacttagaagtagaaatctataatcaaatcctcagccaacttaaaaacagttgtgtgaccttggataagtcccatagccggactgcattctctaaaccagcagctataacgtttcctacctcattagagtgtggtgtgaatgaaaatgtgaagaatgcctaaaacagagtcaggccttgaatgcattagaaagtttcaggcagccactcattccatcaccctgtctcactctttctagtgacccagggtcacttacctgtttttcttaatacaccccaagtctttctcttgcctctctttgtagaccagaattattcttgtgttcatcaatatggattgagtcaaaaattttcaagatctacctgacttattacttcaaggatccatcatcctctggcttccatttttttgtatttctataggcatggattcaaaggggatatctgactggctcaggctagatccagatgaactcctcctacatttgttgtccatcctggtccaatcagtggcagctaagggagctcagtcacttgtttgaagtttgcccagtcaaggggctgtggaaggaagaggaagttaatctgagacaggattgtgacaggcagaccaataaacatgtctgtttacaatctaaatattcataaaattccaatcccccaaattctcccacatatgtatgctcttgtattcccctgagataggaagggaggcatgctcataaccccattttacagatgggaagaataaagtgccaggaatactggtccctccattagggtcacttaatgagccactggtgaaacaagaaataaatccgaattgagagcttagactgcctggtctcctgttaacaattaagactgcaaaaatttcaaaccatatcgcatgcacaataaatactgcatctgaatcaattgtagagacaaagacagaggcacagggagaagacagatctatccaaggtcactcaagtgaggaaataaaccagcttaaaatagacttctgtctcagcagcattgtgctttcactcctgggcaacttcctgcctatacagcaacattaatgccagcaaggaaggaacctgagggttaaatccttggccccagccccagatagcaatacagaaccccacccccgtaattcagtcaataaatagatgtccctttcatacaagtttcagaaaacacagttaatatacaaccactactcacaaattaaataagttatcttactgtaaaggatataactattttattatctttgcaattaaaatgaaatatgctaaaggtagaagcaatacaaaacagctgctgccagaagtttcaataaaagatcactactgggcacccttataactgtgggaccattaggagatttaaatgtcttcttcactttgcccacggtagggagtgaggctgcactgagaaacatcactggcatgaggtctaattgcctgccctatgattaatgttgccaagtgaattcagaagttgtcacagttctcatcctatggtccaggctcatttataaaatagagcaaagggagcccagtgctttgagaatgccaatgcaaaattataataattacttattacatgatacagttgttaaagtattttctgtgttgttcaaaaaaaaaaaaaaaaaactcga

SEQ ID NO: 168 - DNA, 1021 bp, Homo sapiens
  misc_feature (248)..(248): n equals a,t,g, or c
  misc_feature (1004)..(1004): n equals a,t,g, or c
  misc_feature (1014)..(1014): n equals a,t,g, or c
ttcggcagagcccttgcgcgctcttgaatacctgckttctgtagcgctagttctcttcaagatttgcttagtgtcatttcatttcggtttcttttctcgccatgtttttctgtcggaattacggttcgttttggttctatgtactctctaaaatgttatcgtttttcatttgtctactaattttcgtgcatttgttactactgagtttcttaatatctgactggcctccgcccacgggctctgcagancataaaatactcaggctgatggtagtgcagagactctccctccttgatcagcgcaaacgttggtctgaggcttgagggatggagcaacattttcttggctgtgtgaagcgggcttgggattccgcagaggtggcgccagagccccagcctccacctattgtgagttcagaagatcgtgggccgtggcctcttcctttgtatccagtactaggagagtactcactggacagctgtgatttgggactgctttccagcccttgctggcggctgcccggagtctactggcaaaacggactctctcctggagtccagagcaccttggaaccaagtacagcgaagcccactgagttcagttggccggggacacagaagcagcaagargcacccgtagaakargtggggcaggcagargaacccgacagactcaggctccrgcagcttccctggagcagtcctctccatccytgggacagacagcaggacaccgaggtctgtgacagcgggtgccttttggaacgccgccatcctcctgccctccagccgtggcgccacctcccgggtttctcagactgcctggagtggattcttcgcgttggttttgccgcgttctctgtactctgggcgtgctgttcacggatctgtggagctaagcagccttagatagcagcagaaggctttttggattctcctccttgaaaagattctcagttaccaaacgtctccacctagaaaataaaaatacattaagatgttganaaaaaaaaanaaaaaaa

SEQ ID NO: 169 - DNA, 727 bp, Homo sapiens
gctggtatctccagtgtttgggtttagctccaacttacaggttaggaccagcttttctgcaggtgttgaccagcaatttcctgcggcatttacttcttgataacaagagtgagaagatagagacagggcagatagacacttaagagtaaaatgtattaacacaaaggctctggccgcccccctacaaaggaggccatggaaccgatggaactgatggaggaaatgctgggactgtgggtcagtgctgacacacccatggccatacgtttggtcttcttggccttggctgggctggtggatgggaagccagtatggatcaccttgtggatggatgcaaagagaccaaacttggcgggcactggaagtacctggggaagcaggagagactcacactgctgtcatggccccacagcctggagcctcccctgcctcctctgcctcttcagagcccagcagaaagacagagaaagaagcctccttggggttccattacccacactccaaggtggaaatctttcagatggttagatgatgaaggtagtagaaggcaaggatgattgggagtagaaggaagagtgacaggctagcatgagctgtgcagcagcaagattccatatgagcaaagttcagaaagtgrgmmaaaaggaccaagttggatctcctcctaaccctgacctgcatgatatgggtgtgagaagcttcaactgagaaagctgctgagaaagta

SEQ ID NO: 170 - DNA, 1341 bp, Homo sapiens
caggaattcggcacgagagtctgtggtcctctgtatctcaactttttcatcttaaaaaaacaaatagggttgtgtgtgtggctggtggtcataaggtcctttctggctctaataacctgagcttctgttatgaagctgggacccttagagcctcaggatgatcctctgtttgtttgtgaagccccaatcaggtgctaagcaccatagtggcacttagctgaagctcctctgtaactcctgtgggccctgccttgcccacccccgacagctgctgcagtgctcctgagcagcacaggcctgatggagcttctggagaagatgctggccctcaccttggcaaaggcagattctcccaggactgcactcctctgctctgcctggctgctcactgcctccttctctgcccagcagcacaagggcagtttgcaggttcaccagacactctctgtggaaatggaccaagtattgaaggctctcagctttccaaagaaaaaggctgcactactctcagctgccatcttatgcttcctgcggacagccctgcgacaaagcttttcctctgccctggtagccctggtgccctcaggggcccagccactgccagccaccaaggacactgtcctagctccactgcgaatgtcgcaagtccggtccctggtcattgggctgcagaacctcctggtgcagaaggaccctctattgtcccaggcctgtgttggctgcctggaggccttgcttgactacctggatgcccggagcccagacattgctctccacgtggcctcccagccttggaatcggtttttgctgtttaccctcttggatgctggagagaattccttcctcagacctgagattttgaggctcatgaccctgtttatgcggtaccggagtagcagtgtcctctctcatgaagaggtgggtgatgttctgcaaggtgtggctttggctgacctgtctaccctctcgaacaccacactccaggccctgcatggcttcttccagcagctccagagcatgggacacctggctgaccacagcatggcccagaccctgcaggcctccttggagggccttccccctagcacctcctcaggccagccacccctgcaggacatgctctgcctgggaggggtggctgtatccctgtcccacatcagaaactgatcctcaggacttgaaggcccagaagtggagagagaatgagacctggagacaaagggcataattgttggggaaatggatgacagctgaagctattcatatggagccatatactctattgttgaaatagaataaggaaataaaatgatacactcacataaaaaaaaaaaaaaaaaa

SEQ ID NO: 171 - DNA, 839 bp, Homo sapiens
  misc_feature (1)..(1): n equals a,t,g, or c
ngaacccagaagatgctgcctctcctgatcatctgtctcctgcctgccattgaagggaagaactgcctccgctgctggccagaactgtctgccttgatagactatgacctgcagatcctctgggtgaccccagggccacccacagaactttctcaaagtattcactccttgttcctagaggataataattttctcaaaccctggtaccttgatcgtgaccatttggaagaagaaacagccaaattcttcactcaagtacaccaagccattaaaacgttacgagatgataaaacagtacttctggaagagatctacacgcacaagaatctctttactgagaggctgaataagatatctgatgggctgaaggagaagggagccccacccctctccatgaatgccttcccggctccatctcctacttgcaccccagaaccccttggctctgtctgcctccccagcacctcagtttctctaccttctcaccctccctggcagcctgcaatgagtcctgtgccaggaaccggcggacctccctgtgggctgtgagtctcagcagtgctctactcctggccatagctggagatgtttcttttactggcaaaggaagaaggaggcagtaaaggaacagggcagcccgcatgtcttccagaagtgaacagaggccgcagctaccaccgtcacaaagttcactcatctctgggtcccggtgaccccatccccccataccctccatcctgggtcctggggccccaaagctctgaggcctaggagactgcgctgtctcgtggtttgcctactcctacacctttgtaaagagtctcttcattaaaacccct

SEQ ID NO: 172 - DNA, 1022 bp, Homo sapiens
cgctcctgccgccgggaccctcgacctcctcagagcagccggctgccgccccgggaagatggcgaggaggagccgccaccgcctcctcctgctgctgctgcgctacctggtggtcgccctgggctatcataaggcctatgggttttctgccccaaaagaccaacaagtagtcacagcagtagwgtaccaagaggctattttagcctgcaaaaccccaaagaagactgtttsctccagattagagtggaagaaactgggtcggagtgtctcctttgtctactatcaacagactcttcaaggtgattttaaaaatcgagctgagatgatagatttcaatatccggatcaaaaatgtgacaagaagtgatgcggggaaatatcgttgtgaagttagtgccccatctgagcaaggccaaaacctggaagaggatacagtcactctggaagtattagtggctccagcagttccatcatgtgaagtaccctcttctgctctgagtggaactgtggtagagctacgatgtcaagacaaagaagggaatccagctcctgaatacacatggtttaaggatggcatccgtttgctagaaaatcccagacttggctcccaaagcaccaacagctcatacacaatgaatacaaaaactggaactctgcaatttaatactgtttccaaactggacactggagaatattcctgtgaagcccgcaattctgttggatatcgcaggtgtcctgggaaacgaatgcaagtagatgatctcaacataagtggcatcatagcagccgtagtagttgtggccttagtgatttccgtttgtggccttggtgtatgctatgctcagaggaaaggctacttttcaaaagaaacctccttccagaagagtaattcttcatctaaagccacgacaatgagtgaaaatgatttcaagcacacaaaatcctttataatttaaagactccactttagagatacaccaaagccaccgttgttacacaagttattaaactattataaaactc

SEQ ID NO: 173 - DNA, 1028 bp, Homo sapiens
gcatgatcctgtggaacacagtttgggatcatagatgtgaattaagacaccaccgagatacgggctgtgaggttcataccgtgctgatagcactcgtggtgtctgtgaaatgtgggtaagacattcaaacctggttttgatactggaaactcttcctttaaaactgtgaccatgatttcattcagcccctccacacccctatgtctgccttgtttcagagtgagttttctatggagcctgtggcccttttgcagcccacctggtggcttcttaatgtaactcttcccctggtcgcctggagtggaccactcatctgcaggcctctcctgcatggggagggtaggcagggagcagcatgtctgcaggggtgaacctttgctcttctgtcaggcgaggcccaggctgcaccagccacctgccacatggtgacagtgccacgggccctgcgtatggcccctgcaaccgtgctctggcgggcacacctggctgctgcaggccaaggccgctgttcagtgaagagtcccatgtttagtatggactaaagtcccatgtttagccaytgccccagtctcccgtgaccccagaaaccaggtcactggaccacagtgccagatcctcatcacgccggtgagcacctagaagtgagaacactgtattcctacaatgtacacttggatatttctccttatttagtttctagtgaaacaaatcaagtaaggaactatctttagtttagatggaattatttgtttttaattgttgccgtattcatctatatagctaatatttcaagataagtaatgaacaaaacctgtctaaaccttttgtttccaatgaatgaaagtcatgcactttatttataggctctatgttttggcttctgcagtacttttattatctatacataatttggccaaaaataagaaattggaaagaatgaaatgtttagtttatagtagaagaaagatgatgacactaagttgtgaaaatatgttgtgatttttatgaaataaactcacggcacgtag

SEQ ID NO: 174 - DNA, 808 bp, Homo sapiens
tgcaggaattcggcacgagattacaacacatcagaacaaaatgttatggactaccatggagcagaaatcgtgagccttcgtttgctgtcactagtaaaagaagaatttctttttctcagccccaacctagattcacatggactgaaatgtgcatcttctcctcatgggctggttatggttggagttgctgggactgtccatcgaggaaacacttgtttgggcatttttgaacaaatttttggactcatccgctgcccttttgtggagaatacttggaaaatcaaatttatcaacctgaaaattatgggagagagttcccttgctcctggaacattaccgaaaccatctgttaaatttgaacaaagtgatctagaggccttttataatgtaatcactgtatgtggtaccaatgaagtacgacataatgtaaagcaggcttcggatagtggaactggggaccaagtttgaggtagtggaaatgagacattgctgaacaaaagagaactgggtttacctgaccctctaaagcgctaagtactgtcagcctgaaaaaaatcttctatacagaaactcttccaaatactatatcagtaatgtctgaatgatttcagatgtgaaaattgacatattttagttgaaatacctttctggactacagacttacatatcatgtgaatacttacctatttctacccgagttgcagcaagtattctgaaagcttaatgcaaataaatcccactttagatcttaaaaaaaaaaaaaaaaaaaaaaaaaaaaaaaaaaaaaaaaaaaaaaaaaaaaaaaaac

SEQ ID NO: 175 - DNA, 1898 bp, Homo sapiens
  misc_feature (1398)..(1398): n equals a,t,g, or c
  misc_feature (1428)..(1428): n equals a,t,g, or c
ggcacgaggtctccatggcgttagaagtcttgatgctcctcgctgtcttgatttggaccggtgctgagaacctccatgtgaaaataagttgctctctggactggttgatggtctcagttatcccagttgcagaaagcagaaatctgtatatatttgcggatgaattacatctgggaatgggctgccctgcaaatcggatacatacatatgtatatgagtttatatatcttgttcgtgattgtggcatcaggacaagggtagtttctgaggaaactctcctttttcaaaccgagctgtactttaccccaaggaatatagatcatgaccctcaggaaatccatttggagtgttccacctctaggaaatcagtgtggcttacaccagtttctactgagaatgaaataaaattggatcctagtccttttattgctgactttcagacaacagcagaagagttaggattattatcttctagtccaaacttgctctgagctaaaggagaaatggaaacttgaagctggtgttatgtattttgcaggaaaacagtttcattttttcatagcaaaaatatagttggtgtatatctctccttaagtctctggtttctaaaaaccctacttcagtaaaggtcctgattagttgattagtgaatgtgtatttctaaatatttgtattcagtaggggtatggctgattaatttaacattaactattaggtaattcatattatacatttaagttctttctgttctgtgtagaagattcagaaatatgtcttcaaagacaatgacttgatctaattgataagaacctccaataaatatgttctaatatttttcaggaagaataaagaatagagagagacatataaatgtgcaagaggcaaaactttgagcatagtgtaaaatttaacatattaactctcacgaaaggcaaaatccttttatgtgcagatactttaattcatgtagattttcctattaatcagtaaagttgaatcctaacaataatgccatgtgacaacctatttagattattccagaattaaattcaatttattttctagagctcaagtaaccactactttaactgaaatttgatgttaggtttcccttgttcctccgaatggttcttccacactcaaaataattgaatggttgagttggttaagcaaagagttatcctgccacctaagagcattcattaaatgattatttattaccacctactttatactatcttcctttctttaaacatggagtctaaatatgtaatatatcaaaaaatacttctgatttggtagatttcttatatcaagggtgagaattgaactgtgccattggctattcaatagcttattgaatgtatgttttggatgccacatcctcctggaagcaanttttgccaagatactgtttattattatttntaattaaagtgatactattccattttcaattaaatgctgtctgtagctgttaacttgtcagataaagaatttgaccctgtcatagtgaacatctgtctttaccagttaacatgcagctaagaggtaatacttctatgggacttcctaagggtcagaatatggtacaagtacattgcgataaattatttaatcttcttaaagagtgaaatatatcatgattatcccaattttacagataagcaaacagaggttaaatcatttgcctgagtcacataacttgttggtgttggttcaagatttaaaatagggcaatctgcctttagatctgtctctatactctctctttgtatattagccactatactctactgcttggaatcatcttaagttgctgaactttagttctctagaaaacaattgctattcaagcagttatacaactctcaataaaacttaaagttgaaaaaaaa

SEQ ID NO: 176 - DNA, 818 bp, Homo sapiens
aaaacttgagtatgttgagggaaggaatatatatatatctgggagagaatggatacgttttgtttttctgaaatggaattagaaagatgttcagttgtcttgtgcattcttgcaaaccttgcagttttgagagccctgtttctgccttgtatcattttccactgtgtatckgattctaggagcgtgaacagggagacaaaggtgaagtttgtgcacacctctgtccatggggtgggtcatagctttgtgcagtcmgctttcaaggcttttgmccttgttccycctgaggctgttcctgaacagaaagatccggatcctgagtttccaacagtgaaatacccgaatcccgaagaggggaaaggtgtcttggtaacctaatttttttttaaattatgaaatctgcttttatattcaaaactattactgtcaagtaaaatacatttttatgtgttttcattgtgctgaagaaaaactaatttcagcatggaaatatgtatgtttggctgggtgcagcgtctcatgtctgtaatcccagcactttgggagaccaaggcaggcagatcacttgaggtcaggtgttcgagaacagcctggccaacatggcaaaaccctgtctctactaaaaatacaaaaattagctgggtgtggtggtacatgcctgtaatcccagccacttgggaggctgaggcactagaattgtttgaacctgagagatggaggttgcagtgagctgagattgcaccactgcactccagcctgggtgacagggtgacagagcgagactctgtctcaaaaaaaaaaaaaaaaaaaaactcgag

SEQ ID NO: 177 - DNA, 3435 bp, Homo sapiens
  misc_feature (760)..(760): n equals a,t,g, or c
cgagcagcatcagaaagtacgawtctgctctgagggcgratgraaaatgaagawtctgacgtaaagcctccagactkgccaaacccaatgaatgctacctcccagtttcctcagcctcagcactttgcagctttggcctccgtctgcctcgggatatcacagagctgcccgagtgragtaggggtaccccttctacatggccatgggcttcccagggtatgacctctcggctgatgacatagctgggaagtttcagttcagccggggcatgcgccgcagttacgacgcagggttcaagctgatggtagtggaatatgctgagagtaccaacaactgccaggctgccaagcagtttggagtattggaaaaaaacgttcgagactggcgcaaagtgaagccacagcttcaaaacgcccacgccatgcggcgggcattccgaggccccaakaatgggaggtttgctctggtggaccagcgtgtggccgaatatgtcagatacatgcaggccaaaggggaccccatcacccgggaggcgatgcagctgaaagctctcgaaatcgcccaggaaatgaacattccagagaaagggttcaaggcaagcttgggttggtgtcgaagaatgatgagaaggtatgacctgtctctgaggcataaagtgcccgtgccccagcacctgccggaagacctgactgagaaactcgtcacttaccagcgcagtgtcctggctctgcgcagggcgcatgactatgaggtagctcanatggggaatgcagatgagacgcccatttgtttagaggtgccatcacgggtaactgttgataaccagggcgaaaagcctgtcttggtcaagacaccaggcagggaaaaactgaaaatcacagcaatgcttggtgtcttggctgatggraggaagttaccaccgtacatcattttraggggaacatatatccccccggggaagtttcccagtgggatggaaattcgctgccaccggtatgggtggatgactgaagacttgatgcaggactggttggaagtggtgtggagacggaggacaggagcagtgcccaagcagcgagggatgctgatcttgaatggcttccggggccatgccacagattccgtgaagaactccatggaaagcatgaacactgacatggtgatcatsccagggggtctgacctcacagcttcaggtgctggatgtcgtggtctacaagccactgaatgacagtgtgcgggcccagtactccaactggcttctggctgggaacctggcgctgagcccaaccgggaatgctaagaagccacccctgggcctctttctggagtgggtcatggtcgcgtggaatagcatctcaagtgagtccatcgtccaagggttcaagaagtgccatatctccagcaacttggaggaggaagacgatgtcctgtgggaaatcgagagtgagttgccaggaggaggagaaccaccaaaagattgtgacaccgaaagcatggctgagagcaactgaagggaaagggaaagcaaatggaactctgatttaaacagctggggatgaaattcctcaagatgattattcctgaaagtgtggatgcgctggatgcgcagggaacatcaggaaaaggccacggggctctgaacagccccggtccagacagcagcctgtacatccatcccaggacacagcccagcccctccccacaccatacaaggtatcagaaaagtctaggacctatcatttcatcagagacatgatcagaaaagaaactgcttctgccccatttcttgttttggagattactccatctgtccatcaaaagaaacctgtaaatatgaaagaacaaaggttatttcctggagaaaagacaatttattcaacaccaacaagggactcatcatatgggcacaactctggtgtccttctatggagaaaacctcaagtaaagttttattctgcctttgaaaatgcttccaaaagtagaccctgtccccacacaggtcaagactacagagaaggctttgtagaaatgtgtcacctatgtacacctgctacttacacatttcctcttttggaaaaatgagatacttagaataacaagaaaattaagacatactggcctggtgccagcagatggcttttctatagacaaactaggttagtgtggaagatataggttaaaataaactatgctgttttatttatcttcccaacctgattggcagctagacttttttagggtctcatttaatggccctgtttttttcattattatatttaatgatagggcaggatttcgtatgcaagctcttgtttctcaggctgcctgcagaagaagtcgctataaattatctgttgtctacatggtacaaggcccattgactcatctgatgcttgttttgttaatttctttaatatttttatcacggggcagtgggagggcttgggcttttagccacagctgttttaagacttctgatctcctgccctgcaggaataggtgggaagtcattgaatttttacactatagtaatttgcattcccacataagtttgagtgttacgaaaacattcctttaaagggatctgtgctacacaaaatatgccaggacctcacagacaaagccattgctagaaatgtcattccaatgatcagatctggaaacaggctgccataaccacttttccttcttgtagactcagctcacctgtatatttaaactgttcttggcatcttgaaacacctatttctactcaggtactcattgtcctgttactgattcacctttctgatccttttcaaccagttttcccccaaggggggaaattttacttaacctctagtatttgaacaactcaatatttgaattgttgccccatttgcttttacctgtactgtattcttggtcatctcaaatggcgtctaaacccagctactttgcattccagaagtttccattccctccaattccacctaatttttcatctgtcctagttactggctctttcttcatgtcttatttctcttgctttgggagcttaaaagattttacaagacctaattttgggttccttccttggagccatagttaccctgccaagaagagtagaaaatgggttcaactcctgtttcgctccaccaacacctctgtgagtctcatcatcagctgagcgatgatgccttacaggttgcatagcactggaactttcctagagtaacggctctgctgccagggtttctctgggctcattcttccactgacttaattatgatctatgcctaacagagccccagtacaactattttgcagaatggctgttaccctagaattactatagcacatattgagatatagttgtactccctagtagataggaactgaccccaacaataaactttgataataaagamaaaaaaaaaaaaaaaaaaaaaaa

SEQ ID NO: 178 - DNA, 1481 bp, Homo sapiens
ggcacgagcctggcagagagactctgaaatgagggattagaggtgttcaaggagcaagagcttcagcctgaagacaagggagcagtccctgaagacgcttctactgagaggtctgccatggcctctcttggcctccaacttgtgggctacatcctaggccttctggggcttttgggcacactggttgccatgctgctccccagctggaaaacaagttcttatgtcggtgccagcattgtgacagcagttggcttctccaagggcctctggatggaatgtgccacacacagcacaggcatcacccagtgtgacatctatagcacccttctgggcctgcccgctgacatccaggctgcccaggccatgatggtgacatccagtgcaatctcctccctggcctgcattatctctgtggtgggcatgagatgcacagtcttctgccaggaatcccgagccaaagacagagtggcggtagcaggtggagtctttttcatccttggaggcctcctgggattcattcctgttgcctggaatcttcatgggatcctacgggacttctactcaccactggtgcctgacagcatgaaatttgagattggagaggctctttacttgggcattatttcttccctgttctccctgatagctggaatcatcctctgcttttcctgctcatcccagagaaatcgctccaactactacgatgcctaccaagcccaacctcttgccacaaggagctctccaaggcctggtcaacctcccaaagtcaagagtgagttcaattcctacagcctgacagggtatgtgtgaagaaccaggggccagagctggggggtggctgggtctgtgaaaaacagtggacagcaccccgagggccacaggtgagggacactaccactggatcgtgtcagaaggtgctgctgaggatagactgactttggccattggattgagcaaaggcagaaatgggggctagtgtaacagcatgcaggttgaattgccaaggatgctcgccatgccagcctttctgttttcctcaccttgctgctcccctgccctaagtccccaaccctcaacttgaaaccccattcccttaagccaggactcagaggatccctttgccctctggtttacctgggactccatccccaaacccactaatcacatcccactgactgaccctctgtgatcaaagaccctctctctggctgaggttggctcttagctcattgctggggatgggaaggagaagcagtggcttttgtgggcattgctctaacctacttctcaagcttccctccaaagaaactgattggccctggaacctccatcccactcttgttatgactccacagtgtccagactaatttgtgcatgaactgaaataaaaccatcctacggtatccagggaacagaaagcaggatgcaggatgggaggacaggaaggcagcctgggacatttaaaaaaaaaaaaaaaaaaa

SEQ ID NO: 179 - DNA, 652 bp, Homo sapiens
gaattcggcacgagcaacagtggggcactctgctcccaggcaggtcccactgggctgagccgcacagcctggctttgggcttccctgactgcaccacccacatcasctgcctctagcccttaamatacaaaacttcccccagtcactggccgccaggctgagttgggggatgtgttacatccctgggtccactggggggcagtgttggccatggtgttggtgctggctctgccgagaggcgttggagtggctgtgtggggcggtgagcgccggcccagcctgatggaacccactgtaccaggcccaggcctcagcctctgagaaggacttccctgtgtcactcactcatacatgtcctcaggacgtgaagacatttcagcagaccaaagtttccttcgaatttccttcgaatcgtccagatacttggagacatctcctcctcacctgtggggtgctggggcagtcctaggcgtgggggcagatgggtggacagctgctgctgccctgctgggggtgggcagcccttggagcacacagtggtgaagacattcctgaatatgtctcaggctgtagaaatcttattttgtggaaagattttagagaatcatcaaaataaacttttaccaaataaaaaaaaaaaaaaaaaactcga

SEQ ID NO: 180 - DNA, 1711 bp, Homo sapiens
ggcacgagcgctcctgtcctgccactgagggacccggttaccaaccctcatgtagctcagtttgcccatctgtcccggtgctaacacacagttctcgggagactttccccattcccagaggagtagtgcgaaatgcgtgtacctctagtcttaagctgggcgtttgtattagttgggttttctggtgtctatttagcaagtgaaagtttctggttccctccttcactgtgtgacctgactagtcctcctggattgcatttatggaagtttatacgagacctagtttccatggaggaactcactgattccgcgagggagatggggtactggatgatggtcttcagccttaaggctatgtttccagtgtcctctgggtgtttccaagagcggcaagaaacgaataaatctctgacccttctcaggtgcagccagagagacactagcccactgatggacggacagacgtgggcaagggtccgtgtcactaaaccacccaccactgccacagctgcctacaacagacacatcagatgacactccgggcaaataaatgattttcactgaggacttactggttttaataataggtcctggtgtagagaagtccctcaacctattgtgcaacgagttttgagaagcgggtaagctgtatgttttgtggttttgtttcataaattcatctacaggaagaccaatattgactgaatgaagctttcatttaaagagctaaaatatgctttgtgtttttatatgtggatactactttaaacctaacgactattcattgtatcatagcttgtgatgtattctgctcatggcttttaaggtaaattgtgccatgatccactgccattctaattgctttaacaagtcattaccacactactgttacatcttaattatgcatacagacaggtagacttgttttacatatgtgaactaactagttgtcaaagcaaatgcagattgtattctgcaagtaaagtctttttctctctgaaatttctagggatgttctttaagtgaaattcatattaaaactgaagattttagttacaagaactgagtgcagattaagtctttgtgattcaacatagtcaagatacaactgtggatatttcatggaagtatgcaataaaatgtctctacctggaaaaatctatcaagcagcgtcacagtactgaatttgaaaccagaaatactgggtttttatataaatgcttcatagatttgttttatgataaagggcacataactctcctaaacctcacaccacctcttgaataggtataataagtccacatcaatgctgatgccttagctattattaaactcttacagtatgatgtaaagtgaaagtacaatgtaagatcattcctaggccaactttgaccagttttatacagaaacatgtgccaacttttctgtttgcaaggataatatcaaagcaaacaccagaaagttatatctttgatgcattttttcaaaatcatacacataatacacaaaccaaagacaaatgatgaatattacgtcagaaaatataaagtcttcccctttcttcttttgccaagaaagtccaatattttcaccatttttatgcacacaatcaactttatttaagctggaagttaatgtctcattgttttcattgttctaaataaacaccttttcccttgagtattgctctaaaaaaaaaaaaaaaaaaaaa

SEQ ID NO: 181 - DNA, 2058 bp, Homo sapiens
ggcacgagctcaaagagtaagaatccaagtgtgtgacattacatagctttgcatctatggaaacctaaatcataattgtttccactgcccaattatgttccttttcataacatttactattctggctatatttatcatagaacctaggaaccttagagttgacctgaatctaattaaatttcagacctcctggccaaagaccctagtggaagagcaaaactaaatcaacatattaccaatctcaagtatttctctgaggacccagaccactgactttttgttgtcattttcaggttgatcctataactgtatgttctacaatatctgtgctccaccagctcagtgaggaatcaacggaatatcaaaagtaaatattggtcaccatataccttttggtactagtctacgaaataattggctgaggaactgtttcatattaaagaaaagctaaaagcaatgtgtgatcttagattagacctatgattggaatgtatgtatattttatatacaaaatattgaggaaattgacaaaatttaaatacagaatatggattagataataggaatgtatcaaggtcaatatttaaaaagataatttcaacttttattttattcagtgggtacatgtgcagactttgttttacatagtacccaacagtttttcaacgcttatcccccaccctctagtaatctgcagtgtctattattgtcatcttcgtggctattgtacatgggattccatacttgattttgctctcaacatgaacattattggtgtagagaaatgccactaagttttgtacgttgcttttgtatcctgaaactttgctaaagttatttatcatttccaggagcctttcgttggagtctttagggttttctagttagagagtcatcagtgaagagagataatttgacttcttcttttcctttttgggtgccttttacttctttctcttccctgattgctctggctagggtttctaacatcaaattttttgatgttgatcattatactgtagttatgcaggggaatgtctttgttctttctaaagaacattcaatgttaaacattgaaatgtttaacaatgaaagatcattatatgtaatttactctcaaatggtcaagggagaggagagagaaagagacagagagaaagaataagaaaagagagtgagtaaatggggcaaaatgcaaacaatttgtcaatctatgtaaaatgtttacaagagttctgtgttacatttttgcaactcttctgtatgtttaaaataatgttaaaataacaattttcccaaatgtcaaatgttgccacatacaagcatttatgagcatggaaaatgtggcttctgaatgataggatacaaaatctggtgatgagcgaatacactgaatatatcaagattgagttgccatcttagaaggagaatattagctataaatcacatgatgaatacatcaatattaaatagactagaaaaccaataattataaggtcacaagagtgcaataaacatgaattatctccattgcatgtattttcatctctacttgccagttttatgagattcagtccccaatatattttcaattaattcaacatagaagattcacttctagtatgttttcaaattgtttcaaaccctgaccatctttttgattgctctaccttccaaaagaaaagaagggaacactaattttctttcctgatttacttcattgttttcttctgttagattaactttacctataaaagattgtctcttgactttatatatatatatatgtgtgtgtgtgtgtgtgtgtgtgtgtgtgtgtgtgtgtgtgtgtatttgaagaggacatgtgcctccataaaaggaaataaaatgagagaatacattattgattttgtgaaatcaaaatatttgaattatggtttctcaatattcaaaaactcttgcagtttctgtacttatttcttctgatgcatagagtttcggggactacatatgtttcacaaccaaagatatccacttgaaataaaaacattataaagttaaaaaaaaaaaaaaaaa

SEQ ID NO: 182 - DNA, 2398 bp, Homo sapiens
  misc_feature (1874)..(1874): n equals a,t,g, or c
attgcttagtttgatgtgtcttgctttaaatccatttatttcaacaagcttaaagagatttttttttaatggagatgatttaattttaacaatctgtgattttctctgaatcgaacttgtgttttggcacctttcaatctgtggtaacaaatgacaagaagggtgcaattcttccttcccttgtgcagggattttgcctccccctttctcccagatgaaagatatttgggtctctagaataactgtggtacagttagctccagagtgttttctttctggaggcagtttagacaacagcctcaagtagtgcttttgttaaaaatatacatgtttttaaaagtgcttgtatttctaatattcttttctcctttctcttctagtctgttctctggggaggcagtaaggggccgtggagctggcctcggcctcggcatcgggagaggctggacttcctgtctctctgtgctgaatggctgcgatggcgcccgctctcactgacgcagcagctgaagcacaccatatccggttcaaactggctcccccatcctctaccttgtcccctgggcagtgccgaaaataacggcaacgccaacatccttattgctgccaacggaaccaaaagaaaagccattgctgcagaggatcccagcctagatttccgaaataatcctaccaaggaagacttgggaaagctgcaaccactggtggcatcttatctctgctctgatgtaacatctgttccctcaaaggagtctttgaagttgcaaggggtcttcagcaagcagacagtccttaaatctcatcctctcttatctcagtcctatgaactccgagctgagctgttggggagacagccagttttggagttttcyttagaaaatcttagaaccatgaatacgagtggtcagacagctctgccacaagcacctgtaaatgggttggctaagaaattgactaaaagttcaacacattctgatcatgacaattccacttccctcaatgggggaaaacgggctctcacttcatctgctcttcatgggggtgaaatgggaggatctgaatctggggacttgaaggggggtatgmccaattgcactcttccacatagaagccttgatgtagaacacacaattttgtatagcaataatagcactgcaaacaaatcytctgtcaattccatggaacagccggcacttcaaggaagcagtagattatcacctggtacagactccagctctaacttggggggtgtcaaattggagggtaaaaagtctcccctgtcttccattcttttcagtgctttagattctgacacaaggataacagctttactgcggcgacaggctgacaytgagagccgtgcccgcagattacaaaagcgcttacaggttgtgcaagccaagcaggttgagaggcatatacaacatcagctgggtggatttttggagaagactttgagcaaactgccaaacttggaatcsttgagaccacggagccagttgatgctgactcgaaaggctgaagctgccttgagaaaagctgccagtgagaccaccacttcagagggacttagcaactttctgaaaagcaattcaatttcagaagaattggagagatttacagctagtggcatagccaacttgaggtgcagtgaacaggcatttgattcagatgtcactgacagtagttcaggaggggagtctgatattgaagaggaagaactgaccagagctgatcccgagcagcgtcatgtacccctgtgagtagacctcatgcatgatagcattcttgagaaatgttggcacaaggaagaatgaatgaatcgccattatggagagaatgtgttstttgtacataggtgtytagttcygttngttttttccctgatgttgggtagatgagtgcatatacatgctagtgaagaaggggaagatactttgctgtagggttgtattgttgtagtctaaatggtggtaatttccttttgaagtctaagaaaaataactaggagacatcttatgtgtaaaattgtactagtacctctttaagagtgaatttagatttcttttgaaactatatataggacatgataagttaatggcctgattgttgagattttgttgtttccagtaagcagggacaaatgctgagttgacctagttacctttgtaggaaattacagttgcttttgattgaactttcagcagagagcacacccagtcttcaattttaacacttgagattttcttacattttaaggactgacaattagaaaatgcttcagaatatttaatacatcgcctccaagcacagtctagtttcacaacctgactctcttcctattaaaaaaaaaaaaaaaaaactcgrgggggggcccgtacccaatcgcccctcatga

SEQ ID NO: 183 - DNA, 1505 bp, Homo sapiens
gcaccatggccacgcccctggaggatgttggcaagcaggtgggtaggtcttgtctgcttcctgtggccctgatgggtccctgcagagcctcacgctgcttgtcgctccttgtcctcttccctccaggtgtggcggggcgccctgctcctggcagactacatcctgttccgacaggacctcttccgaggatgtacagcgctggagctcggggccggcacggggctcactagcatcatcgcagccaccatggcacggaccgtttattgtacaggtaatgaggtgacatctcaggctgcagggaagtagtcaccttcacaaagcatgcactgactgtataaaaaaagaggcagaggcaatggaaattggatgttagctgctgttgattttgccatcctggtcccctggccctctccactctccattttttctcagtgacatcaaaatgacccagcaatacgcactcagcagcagcagcgtcacccagtggctataaggccattgagcttcaggaggtgcctagcgcccctgctggtacctctctccccactcctgagaaagagcaaatatctccaaaaacaggaggaatatacccttttagaagcctttgaaagcaagtttattatttttttcctgggtatagaagccttgcccattctttgtaggaggtttttaaaacagtacataaaaattactcataattttacaatccctagattgaatcaacaatatgcaacttatgggtcacctcccgtgtgccactcatttctagatgtaggaggccctgcggtgaatggagctgactaggcactgccctcagggcgcttacgttgtaagaatctcctccaaatgatagctgaaatcaagctgcagcagcactgtattctgctgaaaatgttgaaaaacatttttaagagcattttcttttttaaatatgtatatatttagggggtacaagtgcgggtttctgatgtgcagctatattgcagtgatgacatccgtctgggcttttagtggaccttccactcaaatagtgracattgtacccaatagggaagctttaatcccccacccctyccaccgtgtcaccttytggaatccccagtgtctgtgtttccactcagtatgtccatgtttacccattgtttagctcccactcataagtgagaacattttaagagcattttctcatgccattaaaaaattattatataggccaggtgcggtggctgacatctgtaatcccagccctttgggaggctgaggcaggcagatcacctgaggtcaggagtttgagaacagccaggccaacatggtgaaaccctgtctgtactaaaaatacaagaattaaccagatgtggtagcggcgggcacctgtaattccagctacttgggaggcttgaacctgggaggcagaggttgcagtgagctgagattgcaccactgcactccagtctgggccacagagtgagactctgtctcaaaaaaaaaaaaaaaaaaaactcgag

SEQ ID NO: 184 - DNA, 868 bp, Homo sapiens
gactgactatagggaaagctggtacgcctgcaggtaccggtccggaattccgggtcgacccacgcgtccgctgaatttaggagactttttacccaggggcaaaaggctcttagggtaatgagatggatggtggcccaggtgcattttccagggcctgggttctccagatcccgtggcttctgttgagtggaggcaactttgctctgtgtgaacctcgcccctgtccctctgccgggcacccctggcaggaagcaggactcccatcctcaccctgacttagactgtcctctgagtcagctcctctccaagacaggagtgggcagccctgggcagtcttctggccccttgctaaagtgagggscaggaagctggggctgccctccagaaagccggggtaggractctgaaaaatacctcctctaaacggaagcagggytctccagttccacttggcgccccctcccacaaggcccttcctccctgaggaccccacccccctaccccttccccagcagcctttggaccctcacctctctccggtgtccgtgggtcctcagcccagggtgagctgcagtcaggcgggatgggacgggcaggccagaggtcagccagctcctagcagagaagagccagccagaccccaaccctgtctcttgtccatgccctttgtgatttcagtcttggtagacttgtatttggagttttgtgcttcaaagtttttgtttttgtttgtttggtttttgttttgagggggtggggggggatacagagcagctgatcaatttgtatttatttattttaacattttactaaataaagccaaataaagcctcaaaaaaaaaaaaaaaaaaaaaaaaagggcggccgc

SEQ ID NO: 185 - DNA, 1502 bp, Homo sapiens
gctgattacctttatgttggtttctcttattatttgtctcttgctagatctgctaaaccaacccagcttgctcagagatctcatattgaagcaacatacaggcaatccacatctttctttccctttgaagtatagtcattggatgggatgagggacagggcctgttgggttcacagggccttgcactgcatgggcacatacttaaaagctcttgtgcatggaatccctgtctgttagccacaggcctctttagctctatacattcaaaataactactgtagtagaaaatagataagcttcagctgagttggcttttgatagtggaaaaaaaacaaaatttgactttttatggccaaaattccttgttgacagctgtgatgttctaatatgatttgggaatatgtcagtctacagaacctgcatcctgtaaaaacacctttggggtagacgataaaagtcatttttaaggcaaatacttaccatgtgactttttattaccaaatgcatcagtagtggagctggtatgttgtttcataggatggaaacattagaagtccagagaaaaataaattttaaaaaaaggtggaaaagttacggcaaacctgagatttcagcataaaatctttagtatgaagtgagagaaagaagagggaggctggttctgttgctcgtatcaataggttatctgtgtccctcatcttggtgttacagtgttatttctgtcagtattatgaatatgtggttgacccatcctgtcaaatgtaccaacattttcgaaagaattcattcaaatctcttatgccaacagaaaagttccttcttgtttaatatctctttacctcagtcctacattttgattctctggaggagattttagcttgtcttaaaaagccaaatttggagtcatcaagcctgctgaacctgatggggcagctttttgaacagctttctggaagtaagaacttcagttgaaaagccctttgatcgcttcagcccgggacatgcccttcagatggcttattctcagtaaagctttatgtagactgtgacactgtatatgtgtgactcgtacaactttgacgtgtttctgaagtggtttaatcgtatttgttattagcttctttgtggaaatgcaatttttatactaaaaacattgcttatttgcaatgcaatatgttataaatttgttgtttatattactggtattagtcttagcctaatgaacctaattatttttctttctgtattctttgcttcctcaaatagcatctgcagcaattggaatgagaaatccagatatgtgtttcaagtagtacattgcctgaatcacaaatcacttgatcacagtattgtatataatccctgatcctatttgtttcattttattgtaaattcccatttgcatcaaaacctaatgatagtgattggtaagtaaaaacaaatggtgtattgcttttcataaaaaaaaaaaaaaaaaaaaaaaaaaaaaaaaaaaactcgag

SEQ ID NO: 186 - DNA, 3308 bp, Homo sapiens
ccacgcgtccggcccagggctgtctgtctccaaagcccaaccataactcacatccccattccagctcctctgggtgagtctgttccccctcagcctcactttccttatcctgtcaaatgaaggatttggaatgacttaagttattcaagcaacaaacacttactgaattgtcttgccacttccagggtgacattatggagttctgtgattctgcaagaggccagaggggacaaggtcaagtgggtgttcacctggcccctcatcttcctcctgtgcgtcaccattcccaactgcagcaagccccgctgggagaagttcttcatggtcaccttcatcaccgccacgctgtggatcgctgtgttctcctacatcatggtgtggctggtgactattatcggatacacacttgggatcccggatgtcatcatgggcattactttcctggcagcaggacaagtgtccagactgcatggccagcctaattgtggcgagacaaggccttggggacatggcagtctccaacaccatagaagcaacgtgtttgacatcctggtaggacttggtgtaccgtggggcctgcagaccatggttgttaattatggatcaacagtgaagatcaacagccgggggctggtctattccgtggtcctgttgctgggctctgtcgctctcaccgtcctcggcatccacctaaacaagtggcgactggaccggaagctgggtgtctacgtgctggttctctacgccatcttcttgtgcttctccataatgatagagtttaacgtctttaccttcgtcaacttgccgatgtgccgggaagacgattagcgctgagtcgcggcccctgggagctgatctggacaccctgtgacactggcgtcctcctctcccctccttcccccaccacaggtctctcctgcataggcagccactgtccgttctttcacacactggaaggaagagccatcgtggtctttgtctggccacagccaagctgctgggcatcctcctcctccttggagttccacccctgcaaggctggatttgggggccattatctgagcagcttcaaagacccctgagctgccaaccacggagatgtgccaagcatctcatctctcctgcacactttagtcagaaggacttctgcatgcagtttgtctttctgttctgcaggcagcttcagaattgaggtcatttgtgagcacaagatctcatagggcaggtgcaaaataggaatgttgttctcaagtgtcacctccagcccagaggtggttccttaggcagcatgtgctcctgggagcctctgacttttgctggaagcacccacagtttggaaggggcaagacctcaacctgttggggtttagggcccatgatggcagacattctaccccttttcctggaaaaactggaagaatgaaaataatttttttctgtggaagagagaaaatgagtgaatattcttctcacttttattgatgcattcagagaataagcaatgaaatattaaaaaatgaaacatcatataggtcatcatacttgaaaattatcattccatatgaaaggatcatgatacacaccaaaaaagtaatgatcgtaaagacacaaatcctctgtatgccatcttgcattggcactgaggtgtttggtttggaatagggaaaaagagacaggatctcgctgtgttccccaggtaggtcttgaactcctggcctcaagtgatcctcctgccttgacctcccaaagtgctggattacaagcgtgagcccctgcacccggcccaagcagttgcttctttttttctctttttttttttttttgagatggagcctcactctgttgcccaggctggagtgcagtggcgcgatctccactcactgcaagctccgcctcccgggttcatgccattctcctgcctcagcctcccgagtagctgggactacaggcgcctgccaccacacccagctaattttttgtatttttggtacagacagggtttcaccgtgttagccaggatggtcttgatctctgatctcggatccgccaccccggcctccaaagtgctggattacaagcgtgagccaccgggccccgccaagcagttgcttcttatgcaacatgttgggtgggacttgtccacgggccaggccaataaaattcttaatcctgcagagaggcagtaccctcatcaccccatcactggaaaacaaatgtttaagctatcaagagagggaatgtgcagcttggttctagatgcatggtttggaggatctacctttggcctaaagggaatgtcccaaacaacagagccttctttgctgtcactccagaattctctacacagaatttcccaagtccattcaggacagacgcgcagtcctctttcaatggaagaagagaggacttttcccctcctgaaaaatgactggagtgtgaacaaggcagctctgtttttctaaataagttgttcttgtgagttttttctggccactgggcatctctgccctcacttttcatccctgccctctaagctgcagaccccatgaccacactgtctgcttccttgagcttcccgcacgaggcttgcacctgggggacctggagaccctgcggacagaactgtggctgagccactgtggccaactcttggggagctccacagtgggggttgctggtctgtgaggctgagtctccatttcagagcacacactccctggcagggcgcctccgcctgtgtctcctgcccagcagccgccagcagggaatagttgctggtgtctgagcacaaagagagctttgattacctagagaggaaaaaggctgtcagccagatgcagccaggcccaggggtagatacaggagttgctaaggaaggggccgagccaggagaggccaggcagatccacaaagcccaaggggatgcaggctgggtgtggtttctgagggaacctaccaaatagcaggtagatggaatcagaggactcttgtgtcctgaaagaacctccttaaaaacaactaaaaccaagaacttctggggctgttcacacattgttcaagtcaccccaagatcgttctggcacgctgagctgaacaccaccatctttgttcattctctctctaatgggcaaagcaggatcatcgagttgaaaagttgtaaataatgaggatatttatcccgctatttattttttcaataactgtgacctcctgcactgtgaatgctctgtgacatgagattcttagtttaataaaactgtcattaaatttgaaaaaaaaaaaaaaaaaaaaaaaaaaaaaaaaaaaaaa

SEQ ID NO: 187 - DNA, 1769 bp, Homo sapiens
agaaaaattgcagggacccaccccagacttgtgagtgcgagtgaagcaggagcagccctggccatcactgtttctttgacgtgtacatcccatcctgagatgcagctgggctgggagccgccacctgggtggatctgattcctggatttccccatcctggggasaggtgacccatcctgttctcctccttaggtccatgtgaaatctgargtccttgctgtcaagttgtcacaagaaataaactacgcaaagagcctctactatgaacagcagcttatgttaagactcagcgaaaaccgagagcagctggagctggactcctgaagccccgctgctgagatgggcgctcccgacacagcgcagacccaccaggaggaaagaggcccagctctcagctgacgatggaggcagaaccggagtcgggtttggggaagttgtcaaggaatgagggaaagtaaatcctcatgaggaaaagtacaaatggaaatcgtattaatttgtgaggcagggagttattttagattatgggaaataatttttaaaggtattggttaaataacgtttaaaaacatgtactgagatgaatctaatttttagattgccctgtattttgttaacatgtatatatgtacaacagtgtgtttgtaaatatataggaacgtttctgaacagggtctgtgctatgtgtaaaggtttgttaactgtaaagtaatataaagttatattggatcttctattgcactaattctagatgtctaattcaggatactgtctatagaaaggcattcttaaaagttaaagaatgttacgtcttagttttggagactaaagtattcccagtaaagtgggttgaggtgagggctgtggtcctgaaagggacgcctttgacatcgtggctgtccagttgggctgtgagctgtggcacccaggactggcgctggcccttcagaaggatctaggagaggggcttgggagcccacttttaatttctcacccccattttacaaagagtgcttagattcttacaaattatgatgtaagttatccatttggctttttcctaactagtcttaccaaacttagggggaaacctgtgctccattaccacatgggtgcaagtcagcattgtaagttttctcaggttattattattagagaggttggaaacattggtaaactctgttgattgagaaggaaaaaaaaagtcccattgaactgttgcaacaaatcagaaatccacataaaagtgctctcctgcctgggcagcaacaaccaagaacaaagccccgggactgttttctttttaataaagccacaggcaggcatcgtagctccacagcccgaggggacacaggatggaaaccccaggatgagaagggagcagggagagttccagaaagggggatgaaataggagtattaaaaagctgcgttggtaagtttttcatggaaccaagatttgacaaaggcatctcttatccttggttttaaattcctgctgggagcaaggcctggtatgagcgccctgggtcttgtttttggtgtttcgcttttctgtaaggattaagcagatagggagaagggaaaaggggcctcactttagaatgaatgagtcaccttgtgatttttaaatttttattttaataaagctaatcaatttctaaaaaaaaaaaaaaaaaaaaaaaaaagggcggccgctctagaggatccctcgaggggcccaagcttaccgtgcatgcgacggtatagctctctcctatagtgagccta

SEQ ID NO: 188 - DNA, 1677 bp, Homo sapiens
  misc_feature (537)..(537): n equals a,t,g, or c
ccccccgggtcgacccacgcgtccggactttttttattttagctattccagggggtttgaagtagtactgcattgtgattttaatttgcatttccctgatgattaatagtgataagcatattttcatataatatttaccatttatttatcttcttgtttgaaatatctgttcaagtcttatgcccattttaatgggacagtttttctgtttattattgattcatattattgacttatagtaatattttatgaattgatctctttattattatgaaatgyttctttttatttgtggtaatactcatcatcatgaaatctaatttgtctgatattattatagccacttatacttactgtatacctgattattttttccatacctttatcttcaatttatctgtatatttgaattcaaagttcatctcttgagcctgaaagtaataagcaccttgaacccggatctttatatctaaatatgattctccagtaaaatttatcagggttctctggacaagtggctgattgattgtagagcanggataagaagagtatatgctgaacctgaatcatttttgtggtgccaaaagtaaggaagtacacaaaaaaattgagaagatatcawgaaatgcacaaaaactaacctgaagtgactctyaatgaccatatctkggacaatttgagtaaaaaaataagtaacaataatggatgatatcttataagataatataaaacaaatatcaatgagtctatgatgatatagaattagaatgtataaatgggaggaaggggaaaattctttgcttaagcagaataataattaattaatataaaaagaataatggaaatggtagaaatagaaagtcaacatttggcaagcaccacagtaataattgttgcaggcaagaatcatcaatggatgctaaagtttgtgagaaaaagtttgatgagaaatgggctatttacataacctcaaaggcttttcccacaagatactgttaattacaaaggggaaaatattgagaaacatggaagacagcaccttaaccaaatgattgaagttaataccattagtaatgcaacaaatcagtatcgtgtgcctcctgatatgatgcactgagaagggcacaagcatcacctttatggtattcttgcaaaaaatgcataatctaaattcaaccatgaagaaatattagaaggatgttctatgactagtcagtactgctcaaaaatgtcaagattatgaaagacaaagaaagactaaggtactttccagatttaaagaaattaaatagacaggactactaaatgcaatatatgagtctgaattggaccctggactaaaattaggcagacagttggtgaattttgagtcaagtctgtagagtagttaatagtatttctggttttgatcatcataatatggttatttaagatgttaacatttggtggatctgggtgaaaagtatatgaggattctctcgcagtatttttgcaatttttttaaatctgaaattcttttaaaatgagaagttggctgggcacagtggctcacacctgtaatcccagcactttgaaacaccaaggcaggagactcgcttgagcccaggagtttgagaccatcctgcgtaagatggcaagactccatctctttaaaaaaaaaaaaaaaagggcggccgc

SEQ ID NO: 189 - DNA, 2709 bp, Homo sapiens
ggcacgagatttcctacaggtgaaacgccatcattaggattcactgtaacgttagtgctattaaactcactagcatttttattaatggccgttatctacactaagctatactgcaacttggaaaaagaggacctctcagaaaactcacaatctagcatgattaagcatgtcgcttggctaatcttcaccaattgcatctttttctgccctgtggcgtttttttcatttgcaccattgatcactgcaatctctatcagccccgaaataatgaagtctgttactctgatattttttccatgcctgcttgcctgaatccagtcctgtatgttttcttcaacccaaagtttaaagaagactggaagttactgaagcgacgtgttaccaagaaaagtggatcagtttcagtttccatcagtagccaaggtggttgtctggaacaggatttctactacgactgtggcatgtactcacatttgcagggcaacctgactgtttgcgactgctgcgaatcgtttcttttaacaaagccagtatcatgcaaacacttgataaaatcacacagctgtcctgcattggcagtggcttcttgccaaagacctgagggctactggtccgactgtggcacacattcggcccactctgattatgcagatgaagaagattcctttgtctcagacagttctgaccaggtgcaggcctgtggacgagcctgcttctaccagagtagaggattccctttggtgcgctatgcttacaatctaccaagagttaaagactgaactactgtgtgtgtaaccgtttcccccgtcaaccaaaatcagtgtttatagagtgaaccctattctcatctttcatctgggaagcacttctgtaatcactgcctggtgtcacttagaagaaggagaggtggcagtttatttctcaaaccagtcattttcaaagaacaggtgcctaaattataaattggtgaaaaatgcaatgtccaagcaatgtatgatctgtttgaaacaaatatatgacttgaaaaggatcttaggtgtagtagagcaatataatgttagttttttctgatccataagaagcaaatttatacctatttgtgtattaagcacaagataaagaacagctgttaatattttttaaaaattctatttttaaaatgtgattttctataactgaagaaaaatatcttgctaattttacctaatgtttcatcctttaatctcaggacaacttactgcagggccaaaaaagggactgtcccagctagacctgtgagagtatacataggcattactttattatgttttcacttgccatccttgacataagagaactataaattttgtttaagcaatttataaatctaaaacctgaagatgtttttaaaacaatattaacagctgttaggttaaaaaaatagctggacatttgttttcagtcattatacattgctttggtccaatcagtaattttttcttaagtgttttgtgattacactactagaaaaaaagtaaaaggctaattgctgtgtgggtttagtcgatttggctaaactactaactaatgtgggggtttaatagtatctgagggatttggtggcttcatgtaatgttctcattaatgaatacttcctaatatcgttggctctactaatattttccaatttgctgggatgtcacctagcaatagcttggattatatagaaagtaaactgtggtcaatacttgcatttaattagacgaaacggggagtaattatgacacgaagtacttaatgtttatttcttagtgagctggattatcttgaacctgtgctattaaatggaaatttccatacatcttccccatactattttttataaaagagcctattcaatagctcagaggttgaactctggttaaacaagataatatgttattaataaaaatagaagaagaaagaataaagcttagtcctgtgtcttttaaaaattaaaaattttacttgattccccatctatgggctttagacctattactgggtggagtcttaaagttataattgttcaatatgttttttgaacagtgtgctaaatcaatagcaaacccactgccatattagttattctgaatatactaaaaaaatccagctagattgcagtttaataattaaactgtacatactgtgcatataatgaatttttatcttatgtaaattatttttagaacacaagttgggaaatgtggcttctgttcatttcgtttaattaaagctacctcctaaactatagtggctgccagtagcagactgttaaattgtggtttatatactttttgcattgtaaatagtctttgttgtacattgtcagtgtaataaaaacagaatctttgtatatcaaaatcatgtagtttgtataaaatgtgggaaggatttatttacagtgtgttgtaattttgtaaggccaactatttacaagttttaaaaattgctatcatgtatatttacacatctgataaatattaaatcataacttggtaagaaactcctaattaaaaggttttttccaaaattcaggttattgaaaacttttcattttattcatttaaaaactagaataacagatatataaaagtgttaatctttgtgctatatggtatgaaatacaatattgtactcagtgttttgaattattaaagtttctagaaagcaaaaaaaaaaaaaaaaaaa

SEQ ID NO: 190 - DNA, 813 bp, Homo sapiens
ggcacgagatcattttctgtcccctcctatcttaggctgaccggttccctgatgtgttacctgcttctgctactgatccaaactgcagaacttctcattcatccccaaggcctccaggcagtatccaatggggaatcagctctaaaaggaaccagaccaacgttttccagccccttcattctggtgactgaggggaggaaagaatgggagggggtattcttgtctagtggatggaaaggaaacacactgtcaaattactatatctccttggttttctattacagtagaattctccagccatatttttattgtctatgggggaagttggagatggtgaccttgattagaagtgtctggagggggataaatggaggggataagatttcagttggttttggaaaatgttaaagtcttaaaataatgcgtcccatctgaagaattttttctaaaaccagagtttataaaaatatcactgatacagcctgccccctcatttccctgccacaggagatgtcttggactagagacacttgtttaataatagcttgtctctgatattcccagtagcttccctctgtgtgaggaaaggatagaaatgttcaggacatcatcatacaggctcctcatctacaaagttccagtagcagtgacgcctacacggaagacttggaactgcaaacaggctggggtcacctcagtgacatctgacgctgtccaaccagaagttcgatttttgttctgggggtgaaggaggaaacagactgtactaaaggactaaaataatttgtctatactaaaaaaaaaaaaaaaaaa

SEQ ID NO: 191 - DNA, 2288 bp, Homo sapiens
ccacgcgtccgggggctgcaaggacctgagctcagcttccgccccagccagggaagcggcaggggaaagcaccggctccaggccagcgtgggccgctctctcgctcggtgcccgccgccatgtgggccgtcctgaggttagccctgcggccgtgtgcccgcgcctctcccgccgggccgcgcgcctatcacggggactcggtggcctcgctgggcacccagccggacttgggctctgccctctaccaggagaactacaagcagatgaaagcactagtaaatcagctccatgaacgagtggagcatataaaactaggaggtggtgagaaagcccgagcacttcacatatcaagaggaaaactattgcccagagaaagaattgacaatctcatagacccagggtctccatttctggaattatcccagtttgcaggttaccagttatatgacaatgaggaggtgccaggaggtggcattattacaggcattggaagagtatcaggagtagaatgcatgattattgccaatgatgccaccgtcaaaggaggtgcctactacccagtgactgtgaaaaaacaattacgggcccaagaaattgccatgcaaacaggctcccctgcatctacttagttgattcgggaggagcatacttacctcgacaagcagatgtgtttccagatcgagaccactttggccgtacattctataatcaggcaattatgtcttctaaaaatattgcacagatcgcagtggtcatgggctcctgcaccgcaggaggagcctatgtgcctgccatggctgatgaaaacatcattgtacgcaagcagggtaccattttcttggcaggaccccccttggttaaagcggcaactggggaagaagtatctgctgaggatcttggaggtgctgatcttcattgcagaaagtctggagtaagtgaccactgggctttggatgatcatcatgcccttcacttaactaggaaggttgtgaggaatctaaattatcagaagaaattggatgtcaccattgaaccttctgaagagcctttatttcctgctgatgaattgtatggaatagttggtgctaaccttaagaggagctttgatgtccgagaggtcattgctagaatcgtggatggaagcagattcactgagttcaaagccttttatggagacacattagttacaggatttgctcgaatatttgggtacccagtaggtatcgttggaaacaacggagttctcttttctgaatctgcaaaaaagggtactcactttgtccagttatgctgccaaagaaatattcctctgctgttccttcaaaacattactggatttatggttggtagagagtatgaagctgaaggaattgccaaggatggtgccaagatggtggccgctgtggcctgtgcccaagtgcctaagataaccctcatcattgggggctcctatggagccggaaactatgggatgtgtggcagagcgtatagcccaagatttctctacatttggccaaatgctcgtatctcagtgatgggaggagagcaggcagccaatgtgttggccacgataacaaaggaccaaagagcccgggaaggaaagcagttctccagtgctgatgaagcggctttaaaagagcccatcattaagaagtttgaagaggaaggaaacccttactattccagcgcaagggtatgggatgatgggatcattgatccagcagacaccagactggtcttgggtctcagttttagtgcagccctcaacgcaccaatagagaagactgacttcggtatcttcaggatgtaactggaataaaggatgttttctgttggacatgtactgaaaattaacacatgtagtagccttaaaattttagacttctcgaacatgaggctgttacagtaatttttttaacactgtgcattgtacttttctaccttaaaaaaatcagtgaggatatttatttaatgaacatcaattccttttaaattttcttagagaaatttctctgtggctcagttttaccacccataaagcggagacagtaatttatggtatcctttctgacccacaaagtatgaaaagttctgtaatctgtaaactcagttctgtaatctgtattattgagatgattaatataaagttgtattttcactgaaaaaaaaaaaaaaaaaaaaaaaaaaaaaaaaaaaaaaaaaaaaaaaaaaaaaaaaaaaaaaaaaaaaaaaaaaaaaaaaaaaaaaaaaaaaaaaaaaaaaaaaaaaaaaaaaaaaaaaaaaaaaaa

SEQ ID NO: 192 - DNA, 3758 bp, Homo sapiens
ccacgcgtccgctttttctcaggatgaatattttcctggccgactcattgatccttggtacaaataaacttctggaagacccagagagaggaaaacacaggagaaattgagcgatgtacgtacatcaaataccactactcctcagcaaccatccccaggaacctcactttcaatatcacgaagaccatccgtcaggatgagtggcatgccctacacctgcgcagaatgacggctggcttcatgggcatggcggtggccatcatcctctttggctggatcatcggcgtgctgggctgctgctgggaccgaggccttatgcagtacgtggcaggctgctcttcctcatgggagggaaaacagtggaattaaagagtgtctgccccagcccggcagggtgaagtaggatggggaaaacgttctcaccagaccctgggacttctatgctgcagcatcgtgacctgaggggtggatgcagttgccacagctctttgaggcaaaggccccgatgctctgtggacagcctcaggcttgggatggatttggcagtgaggaacttattgtaacagaagaaagtcatccaagatgcctgaggaaagaaaccttcaattgagccagccggctggaaaatgtggccaagaaaaccgcagagaccaatgttcggaggagaaaaccagaaagaggggcctgcctggcccctttgatcctttatggccgattccgtggacattgctgctcctcacgccggcagccctctcttgagtacctcaattgcagtctccagaccctcaccccgcaggcattcctgggtcggtgtcccagtcggtcacagtcatggatcctctgcagagcagtagaaagtcgggaggggcccgtgcccatggtcaggaaaggagcggcaggaggaaagaggagcatgagaactcagaagaaattgtacctactcagaaggtggagtgaggatagacgttcccagattcaaaggcatcatgaagtgtcatgacaagatagaaaagactttgggctggccaagaaggaactggataaaattatgagtgaggtacagcaggtgggaacagtgtcactgaaccctatcaacagcagagcatgagaacgtgaattcctgctgctggggaggcaatgaaatgatatgggccttcagatgtctatgaatcctgacccaccgtgggtgccagttttcaagagggcttcccatcaaatattgtgcgcaaaggatggatggatgaaaggaagagtgagccaataaacgagggaacgccgggaaaggcagcctcaagccggtgggccctggcacccccaccgtccctgagcatcgagccggttcccgccccggcccgaactggcccgcgcgcgctcgcagccccgcggcggaacccgagggcggcggcagcggttccttgaacgagccggggaatctggagggagcacacaggaaaggcagagccgcgagctggaccagcggcaaatctctagaagatgacgggttctttaaaacgcttcgaaatcactggaagaaaactacagctgggctctgcctgctgacctggggaggccattggctctatggaaaacactgtgataacctcctaaggagagcagcctgtcaagaagctcaggtgtttggcaatcaactcattcctcccaatgcacaagtgaagaaggccactgttttctcaatcctgcagcttgcaaaggaaaagccaggactctatttgaaaaaaatgctgcccgattttacatttatctggcatggatgtgactattgtaagacagattatgagggacaagccaagaaactcctggaactgatggaaaacacggatgtgatcattgttgcaggaggagatgggacactgcaggaggttgttactggtgttcttcgacgaacagatgaggctaccttcagtaagattcccattggatttatcccactgggagagaccagtagtttgagtcataccctctttgccgaaagtggaaacaaagtccaacatattactgatgccacacttgccattgtgaaaggagagacagttccacttgatgtcttgcagatcaagggtgaaaaggaacagcctgtatttgcaatgaccggccttcgatggggatctttcagagatgctggcgtcaaagttagcaagtactggtatcttgggcctctaaaaatcaaagcagcccactttttcagcactcttaaggagtggcctcagactcatcaagcctctatctcatacacgggacctacagagagacctcccaatgaaccagaggagacccctgtacaaaggccttctttgtacaggagaatattacgaaggcttgcgtcctactgggcacaaccacaggatgccctttcccaagaggtgagcccggaggtctggaaagatgtgcagctgtccaccattgaactgtccatcacaacacggaataatcagcttgacccgacaagcaaagaagattttctgaatatctgcattgaacctgacaccatcagcaaaggagactttataactataggaagtcgaaaggtgagaaaccccaagctgcacgtggagggcacggagtgtctccaagccagccagtgcactttgcttatcccggagggagcagggggctcttttagcattgacagtgaggagtatgaagcgatgcctgtggaggtgaaactgctccccaggaagctgcagttcttctgtgatcctaggaagagagaacagatgctcacaagccccacccagtgagcagcagaagacaagcactctgagaccacactttaggccaccggtgggaccaaaagggaacaggtgcctcagccatcccaacagtgtcgtcagagggtccccagggcattttcatggcaagtacccctctgcccccactccagcagtgcttcccaaagtgtgctctgtcacctgctttgcaatcggcttccattagcgcatgttttattttggtgtgacggttggccctcctaaacacggactttcctcaggctggttcaagacggaaaaggactttcttctgttttcttccaaagtgcaaccacagtggagagcccacggtgggcttagcctgcctaggcccttccatttctcttctttgaccgtgctaggaattccaggaaagtgcattcctgccctggtgaccttttcctatgtctaggctcctccacaggtgctgctattttgtgagctccggctcctgtttagcttttatttcagttctaacctcagtccagaaacatatgtgaggttgtttccctcttcagccacggctacaataccggaaaatgctagtttttatttatttttttaagtagtgcttcctaaatggtttgcatgagagccacctggggtacatgttgaaaacttatttggggtctaccccaaacctaataacccaaatttggggatggggcccaggaatatgcatttttaaaaagtcatctgcccttcccaggtgattctgtaagttgtccctcaactgtacttggagaaatcgtgttttaaagcagtagtccacaaagtattctgctcatgtgcccccaaaagtattttgaaaaatcatgtataccctcacccatctaagttgatatctaaaattttatctaagttggtatctaaaatttttcatgggaagttaaatagttgacaaagtatgtatttgctggtgtcgtgtaaatattggtattttaaaataaaaactgttacatcactaaaaaaaaaaaaaaaaaaaaaaaa

SEQ ID NO: 193 - DNA, 1534 bp, Homo sapiens
  misc_feature (1212)..(1212): n equals a,t,g, or c
tcgaagataggttcgagacggtggatgttgcagctgatcatgcagttgggttcggtgctgctcacacgctgccccttttggggctgcttcagccagctcatgctgtacgctgagagggctgaggcacgccggaagcccgacatcccagtgccttacctgtatttcgacatgggggcagccgtgctgtgcgctagtttcatgtcctttggcgtgaagcggcgctggttcgcgctgggggccgcactccaattggccattagcacctacgccgcctacatcgggggctacgtccactacggggactggctgaaggtccgtatgtactcgcgcacagttgccatcatcggcggctttcttgtgttggccagcggtgctggggagctgtaccgccggaaacctcgcagccgctccctgcagtccaccggccaggtgttcctgggtatctacctcatctgtgtggcctactcactgcagcacagcaaggaggaccggctggcgtatctgaaccatctcccaggaggggagctgatgatccagctgttcttcgtgctgtatggcatcctggcccctggcctttctgtcaggctactacgtgaccctcgctgcccagatcctggctgtactgctgccccctgtcatgctgctcattgatggcaatgttgcttactggcacaacacgcggcgtgttgagttctggaaccagatgaagctccttggagagagtgtgggcatcttcggaactgctgtcatcctggccactgatggctgagttttatggcaagaggctgagatgggcacagggagccactgagggtcaccctgccttcctccttgctggcccagctgctgtttatttatgctttttggtctgtttgtttgatcttttgcttttttaaaattgttttttgcagttaagaggcagctcatttgtccaaatttctgggcttcagcgcttgggagggcaggaaccctggcactaatgctgtacaaggtttttttcctgttaggaagaacttgaggccagctgcccactgagtcttctgtccctgaagaaagggagtattgggcagggcttgggatccggctactgagagtgggagagtgggagacagaggaaggaagatggagattggaagtgagcaaatgtgaaaaattcctctttgaacctggcagatgcagctaaactctgcagtagtgtttggagactgtganagggagtgtgtgtgttgacacatgtggatcaggcccaggaagggcacaggggctgagcactacagaagtcacatgggttctcagggtatgccaggggcagaaacagtaccggctctctgtcactcaccttgagagtagagcagaccctgttctgctctgggctgtgaaggggtggagcaggcagtggccagctttgcccttcctgctgtctctgtttctagctccatggttggcctggtgggggtggagttccctcccaaacaccagaccacacagtcctccaaaaataaacattttatatagacaaaaaaaaaaaaaaaaa

SEQ ID NO: 194 - DNA, 2664 bp, Homo sapiens
ggttgctggcccaggtgagcgggcgcgctggtccaggtgagcgggcgcgtccccgcgacggcgctgcctgcccgaggcggttcacgtaaagacagcgagatcctgagggccagccgggaaggaggcgtggatatggagctggctgctgccaagtccggggcccgcgccgctgcctagcgcgtcctggggactctgtggggacgcgccccgcgccgcggctcggggacccgtagagcccggcgctgcgcgcatggccctgctctcgcgccccgcgctcaccctcctgctcctcctcatggccgctgttgtcaggtgccaggagcaggcccagaccaccgactggagagccaccctgaagaccatccggaacggcgttcataagatagacacgtacctgaacgccgccttggacctcctgggaggcgaggacggtctctgccagtataaatgcatgacggatctaagcctttcccacgttatggttataaaccctccccaccgaatggatgtggctctccactgtttggtgttcatcttaacattggtatcccttccctgacaaagtgttgcaaccaacacgacaggtgctatgaracctgtggcaaaagcaagaatgactgtgatgaagaattccagtattgcctctccaagatctgccgagatgtacagaaaacactaggactaactcagcatgttcaggcatgtgaaacaacagtggagctcttgtttgacagtgttatacatttaggttgtaaaccatatctggacagccaacgagccgcatgcaggtgtcattatgaagaaaaaactgatctttaaaggagatgccgacagctagtgacagatgaagatggaagaacataacctttgacaaataactaatgtttttacaacataaaactgtcttatttttgtgaaaggattattttgagaccttaaaataatttatatcttgatgttaaaacctcaaagcaaaaaaagtgagggagatagtgaggggagggcacgcttgtcttctcaggtatcttccccagcattgctcccttacttagtatgccaaatgtcttgaccaatatcaaaaacaagtgcttgtttagcggagaattttgaaaagaggaatatataactcaattttcacaaccacatttaccaaaaaaagagatcaaatataaaattcatcataatgtctgttcaacattatcttatttggaaaatggggaaattatcacttacaagtatttgtttactatgaaattttaaatacacatttatgcctagaaggaacggactttttttttctattttaattacacataatatgtaattaaagtacaacataatatgttgtttctctgtagcccgttgagcatatgagtaagtcacatttctattaggactacttmcaaggacaaggtttccatttttccagttgtaaaattggaaccatcagctgataacctcgtagggagcaaccccaggatagctaagtgttatgtaatatgcctagaaggtgatgtgaatgcgattcagaagcatagccactcccattttatgagctactcacatgacaaatgtcatcttttgctataacctttgccaagttagagaaaagatggatttaatgagataaatgaaaagatatttamcctaatatatcaaggcactatttgctgttatgctttgttatttatttcccagcacttgttccttattgtagattttttaaagactgtaaccttttactaactgtggtcttactaaaatttgtgcttgatactgcttttcaaaaagcctttaattagagccaaaaggatggaaaaggcaagatataaatgccttttatagatctcttatttacattgaaaattattaccatatgtttagagcaaatccaagaaaacttcaacagcttctgaagatgtctatgaatgttgaaaacttttcaatctcttggaatgctcagttatgttcctagaccggtctttgctgactactggttgttaacctttccctagcctgggacctcaagccatatatatcctttgggtgacccatggccaaagttattaagatgaactgactttcaaagtcagagaaggacagcatagggagaggcggttatttgtaagtcattacaggtagaacagggcagaaggaaaagtatgttctggagaaagggccatgttcctaactttggagatatgtcattgccgggaacctagtatcttccaacttgaattggtggcagctgttccagtgagacaaggcacatgtatgccttgtggctaagtgagcaaactgggtttccacttaaatgtttgggaccctcaattgattctttatttcaaacctttataaaaggtacagttttgtaagccattattaataattaatgcttatcggctgggcacagtggctcacacctataatcccagcacttgggaggctgaggcggttggatcacttgaggtcaggagtttgagaccagctggccaacatggtgaaacagcgtctctactaaaaatacaaaaatttgccgggcgtggtggcgcatgcttatagtctcagctactcaggaagctgaggtacgagaatcacttgaacccaggaggtggaggttgcagtgagctgagattgtgccactgcactgcagcctggctcgag

SEQ ID NO: 195 - DNA, 1076 bp, Homo sapiens
  misc_feature (1029)..(1029): n equals a,t,g, or c
  misc_feature (1037)..(1037): n equals a,t,g, or c
  misc_feature (1040)..(1040): n equals a,t,g, or c
ggcacgaggggaaagccatgctcccaggactccttccttgcagccttaaatcggtctgtacggaaaattccgcgccttagaaacccacgcttgggtgtaacttattattgttcttcctgacctacttcctgtttatcacttccgggttcatcattttggcatttcggtgatcgggttggaactattgaagcccgctttcaggttcttttccccattttccctttgaaaggaagacttctggcttctcctaaatctccgttctctgggtaaggggagtccaagcctctgtcatgaggaacggaaatgcgagggcctcgggtgttactctaaaatccgccctcagcttgcacgccggaagctgcgattcctgcagcggaagaggcgtgatctggccttcgactcgctatgtccactaacaatatgtcggacccacggaggccgaacaaagtgctgaggtacaagcccccgccgagcgaatgtaacccggccttggacgacccgacgccggactacatgaacctgctgggcatgatcttcagcatgtgcggcctcatgcttaagctgaagtggtgtgcttgggtcgctgtctactgctccttcatcagctttgccaactctcggagctcggaggacacgaagcaaatgatgagtagcttcatgctgtccatctctgccgtggtgatgtcctatctgcagaatcctcagcccatgacgcccccatggtgataccagcctagaagggtcacattttggaccctgtctatccactaggcctgggctttggctgctaaacctgctgccttcagctgccatcctggacttccctgaatgaggccgtctcggtgcccccagctggatagagggaacctggccctttcctagggaacaccctaggcttacccctcctgcctcccttcccctgcctgctgctgggggagatgctgtccatgtttctaggggtattcatttgctttctcgttgaaacctgttgttaataaagtttttcactctgaaaaaaaaaaaaaaaanaraaaacncgngggggggcccggaacccaattcsccggatagtgagt

SEQ ID NO: 196 - DNA, 943 bp, Homo sapiens
ggcacgagctccgcccggccccgaggggctctccccggaggctcagccccctctgctccccatgggcaactgccaggcagggcacaacctgcacctgtgtctggcccaccacccacctctggtctgtgccactttgatcctgctgctccttggcctctctggcctgggccttggcagcttcctcctcacccacaggactggcctgcgcaccctgacatcccccaggactgggtctcttttttgagatcttttggccagctgaccctgtgtcccaggaatgggacagtcacagggaagtggcgagggtctcacgtcgtgggcttgctgaccaccttgaacttcggagacggtccagacaggaacaagacccggacattccaggccacagtcctgggaagtcagatgggattgaaaggatcttctgcaggacaactggtccttatcacagccagggtgaccacagaaaggactgcaggaacctgcctatattttagtgctgttccaggaatcctaccctccagccagccacccatatcctgctcagaggagggggctggaaatgccaccctgagccctagaatgggtgaggaatgtgttagtgtctggagccatgaaggccttgtgctgaccaagctgctcacctcggaggagctggctctgtgtggctccaggctgctggtcttgggctccttcctgcttctcttctgtggccttctctgctgtgtcactgctatgtgcttccacccgcgccgggagtcccactggtctagaacccggctctgagggcactggcctagttcccgacttgtttctcaggtgtgaatcaacttcttgggccttggctctgagttggaaaaggttttagaaaaagtgaagagctggaatgtgggggaaaataaaaagcttttttgcccaaaaaaaaaaaaaaaaaaaaaaaaaaaaa

SEQ ID NO: 197 - DNA, 1566 bp, Homo sapiens
cgcgtccggcgcccggcagctgtccaccgatcccggccaccgcccccggccacccccaccccgcgagcccatggaggctccgggaccccgcgccttgcggactgcgctctgtggcggctgttgctgcctcctcctatgtgcccagctggctgtggctggtaaaggagctcgaggctttgggaggggagccctgatccgcctgaatatctggccggcggtccaaggggcctgcaaacagctggaggtctgtgagcactgcgtggagggagacagagcgcgcaatctctccagctgcatgtgggagcagtgccggccagaggagccaggacactgtgtggcccaatctgaggtggtcaaggaaggttgctccatctacaaccgctcagaggcatgtccagctgctcaccaccaccccacctatgaaccgaagacagtcacaacagggagccccccagtccctgaggcccacagccctggatttgacggggccagctttatcggaggtgtcgtgctggtgttgagcctacaggcggtggctttctttgtgctgcacttcctcaaggccaaggacagcacctaccagacgctgtgagtacctggccagcagcaagtacctgagtcccagctcacctcctggttcctgccccaccgttccccttcagtacccagggtgctgtcttctccatgggcaagccctcaggacggtgacagcgtgctccatgtgagccacaccccttttgtctcctccagttggggtgtttcctttgtcagatgttggctgggaccaggactcagcctgggccagtctaggagcccagctgagccctcctgtgtcttttcccttcatgctgccagcagggaagagaaccagtaggtgccagcccaggcaagcctgtggcccgcgtttctgtggctgtgggcaggagctgggccttgtgtctagttgggttttgctctgagaaggggagctgtgcctgaggccctctgtgtgccgtgtgtgctgtggggcgggtcgccacagcctgtgttaaagtgtttgctcttcctctgctgcctcctctcgaggcagggggtccttggctggctgaggcagtgtcaccttcctgagtgtcctctttggcctctgcagaatctgacccctttgggcctggactccatcctgagggcaaaggaggatgcagagggtggcctctgggcacccttgtgggtaagcggggggcgggggcgggaaaaactctggccgccagtttttggctcctgcgggcaccaagcaggctcagtgtctgatgcctgacatctcctcctgtcctgggcctggaacctgcagctgagaaaatccctcaaccacctcgtctcctccatcgcccctgctgggccccccagcctgacagtgggttgtatgcctgcctctttccaccaactggcctgggcactgcccccaaataaaggaactctgcactgcaaaaaaaaaaaaaaaaaaaaaaaaaaaaaaaaaaaaaaaaaaaaaaaaaaaaaaaaaaaaaaaaaaaaaaaaaaaaaaaaaaaaaaaaaaaaaaaaaaaaaaaa

SEQ ID NO: 198 - DNA, 1067 bp, Homo sapiens
taccggtccggaattcccgggtcgacccacgcgtccggcgcccggcagctgtccaccgatcccggccaccgyccccggccacccccaccccgcgagcccatggaggctccgggaccccgcgccttgcggactgcgctctgtggcggctgttgctgcctcctcctatgtgcccagctggctgtggctggtaaaggagctcgaggctttgggaggggagccctgatccgcctgaatatctggccggcggtccaaggggcctgcaaacagctggaggtctgtgagcactgcgtggagggagacagagcgcgcaatctctccagctgcatgtgggagcagtgccggccagaggagccaggacactgtgtggcccaatctgaggtggtcaaggaaggttgctccatctacaaccgctcagaggcatgtccagctgctcaccaccaccccacctatgaaccgaagacagtcacaacagggagccccccagtccctgaggcccacagccctggatttgackgggccagctttatcggaggtgtcgtgctggtgttgagcctacaggcggtggctttctttgtgctgacttcctcaaggccaaggacagcacctaccagacgctgtgagtacctggccagcagcaagtacctgagtcccagctcacytctggttcctgcccacgttcccttcagtacccagggtgctgtcttctccactggcaagccctcaggacggtgacagcgtgctycatgtgagccacaccccttttgtctyctccagttggggtgtttcctttgtcagatgttggctgggaccaggactcagcctgggccagtctaggagcccagctgagccctcctgtgtcttttcccttcatgctgccagcagggaagagaaccagtaggtgccagcccagcaacctgtggcccgcgtttctgtggctgtgggcaggagctgggccttgtgtctagttgggttttgctctgagaaggggagctgtgctgaggccctctgtgtgccgtgtgtgctgtggggcgggtcgccacagcctgtgttaaagtgtttgctcttcc

SEQ ID NO: 199 - DNA, 2078 bp, Homo sapiens
  misc_feature (1177)..(1177): n equals a,t,g, or c
  misc_feature (1187)..(1187): n equals a,t,g, or c
  misc_feature (2057)..(2057): n equals a,t,g, or c
ggcacgaggagttgtgcagatacctggctgagagctggctcaccttccagattcacctgcaggagctgctgcagtacaagaggcagaatccagctcagttctgcgttcgagtctgctctggctgtgctgtgttggctgtgttgggacactatgttccagggattatgatttcctacattgtcttgttgagtatcctgctgtggcccctggtggtttatcatgagctgatccagaggatgtacactcgcctggagcccctgctcatgcagctggactacagcatgaaggcagaagccaatgcyctgcatcacaaacacgacaagaggaagcgtcaggggaagaatgcacccccaggaggtgatgagccactggmagagacagagagtgaaagcgaggcagagctggctggcttctccccagtggtggatgtgaagaaaacagcattggccttggccatttacagactcagagctgtcagatgaggaggcttctatcttggagagtggtggcttctccgtatcccgggccacaactccgcagctgactgatgtctccgaggatttggaccagcagagcctgccaagtgaaccagaggagaccctaagccgggacctaggggagggagaggagggagagctggcccctcccgaagacctactaggccgtcctcaagctctgtcaaggcaagccctggactcggaggaagaggaagaggatgtggcagctaaggaaaccttgttgcggctctcatcccccctccactttgtgaacacgcacttcaatggggcagggtccccccmagatggagtgaaatgctcccctggaggaccagtggagacactgagccccgagacagtgagtggtggcctcactgctctgcccggcaccctgtcacctccactttgccttgttggaagtgacccagccccctccccttccattctcccacctgttccccaggactcaccccagcccctgcctgcccctgaggaagaagaggcactcaccactgaggactttgagttgctggatcagggggagctggagcagctgaatgcagagctgggcttggagccagagacaccgccaaaaccccctgatgctccacccctggggcccgacatccattctytggtacatcagaccaagaagctcaggccgtggcagagccatgagnccagccgttnaggaaggagctgcaggcacagtagggcttcttggctaggagtgttgctgtttcctcctttgcctaccactctggggtggggcagtgtgtggggaagctggctgtcggatggtagctattccaccctctgcctgcctgcctgcctgctgtcctgggcatggtgcagtacctgtgcctaggattggttttaaatttgtaaataattttccatttgggttagtggatgtgaacagggctagggaagtccttcccacagcctgcgcttgcctccctgcctcatctctattctcattccactatgccccaagccctggtggtctggccctttctttttcctcctatcctcagggacctgtgctgctctgccctcatgtcccacttggttgtttagttgaggcactttataatttttctcttgtcttgtgttcctttctgctttatttccctgctgtgtcctgtccttagcagctcaaccccatcctttgccagctcctcctatcccgtgggcactggccaagctttagggaggctcctggtctgggaagtaaagagtaaacctggggcagtgggtcaggccagtagttacactcttaggtcactgtagtctgtgtaaccttcactgcatccttgccccattcagcccggcctttcatgatgcaggagagcagggatcccgcagtacatggcgccagcactggagttggtgagcatgtgctctctcttgagattaggagcttccttactgctcctctgggtgatccaagtgtagtgggaccccctactagggtcaggaagtggacactaacatctgtgcaggtgttgacttgaaaaataaagtgttgattggctagaaaaaaaaaaaaaaaaattnctgcggtccgcaagggaattc

SEQ ID NO: 200 - DNA, 2494 bp, Homo sapiens
  misc_feature (920)..(920): n equals a,t,g, or c
ggagatgtttaaggattacccgccagccataaaaccatcctacgatgtgctgctgctgctgctgctgctagtsytcctsctgcaggccggcctcaacacgggcaccgccatccagtgygtgcgcttcaaggtcagtgcaaggctgcagggtgcatcctgggacacccagaacggcccgcaggagcgcctggctggggaggtggccaggagccccctgaaggagttcracaaggagaaagcctggagagccgtcgtggtgcaaatggcccagtgacccccagacgcggaaaccgggtggcagckcccagcctggccccaagcatggaaacgcacaacccctaatcgccctgagctactgcttctaacacctcttttcccttgtgtgagggcaaaccaggctgcaggtggggttttcacttcctagggtagtttaattttaaaataggccaatgttggctagtctgtgcctcagtgagatcagtcagctccgagtggctcccgtgtcgtaacagcaggagcatggccgcaacttcccaggccgaggaagggcccccggctcggcctcttgagagccccacccctgaactggccccagctcctcttcctgcctctctcatggcttgggctggagtgggctctctggacctgaccagactgtgggtccctgcgtctcctgcccactctgaccgggcttcctccctccacgcttagggtctgtcccgggtactcagtcagcccagtgggatcttacccacttccctgcaaggtgcacctgccccaggctcaggctgcccagcggctcttcctggacagtgagagcagggctgggcgcctctgtcctggcccgggagccgcaggggcccctcctccagagcctgggcgcaagcgacacaggctgccgctgctctccaggtgaaatncacaccagtccacgccgggtcgcctgccctgtctccctacttagacccagtcattctagagggatccamcgccamactggccggcccacgtcctgggtgctgtcatgcccagcttggagtgccacgtggccgctgcccacgtcccgggcactgtcatgcccagcttggagtgccacatggccgctgcccacgtcccgggcactgtcatgcccagcttggagtgccacgtggccgctgctgtgacaggcagtgttcttgggggtggggctgcatccaaggctttgtaaaccggctggaccacgtctccctggccccagtgaccgggggaagctgagcccctccctcctgtgtttgctcccattactcaaaatgcaggacagatcaggtcagagcccaggaattctcacaggttcacccagcgccctctacctcctagcaagtactttgtcttgatcctcactgagaaggccccagggcagtggtcttctccatctccgctgttttggggtcttagggtacagcccaggcggtcactgcccacctgccaggctgcagggacagttgggtgtgagaataacactggctttgggtagtgccatggccaggagtgggtttccctgcgtctcctcgtcccgagggcgcctgggtcctcccagctgacggcagtaaatccacagtgagttggggcgactgtgaaactggaatgctgttactttgataattactttccagcaggtgttttccttcacaatggttttgtttctttccttctgatctgagaagacatgaacgttttctcttcaccgccgtggggtgtattgactggtcccccatgggctgctggaaaggcccggagatgcatctgtggcctggggccatcaagatcaaagaaccaggaggcctgggagatgcagctggatggggcggcctgcagaccctgccagggggtttgaggaccctcccaggtttcccactgcggaacaggagtgactctggctgccaagataccttcatggtgttcatgacaagtggaatcattattttcaaccattgaagggggatgcaggcaagacaccttcccagctgctcctagaggggacaagccaggccctctctgcagtcctcggcagctccggaaggacacagtcaggggccgggcaaacactttggccacagccccaaacaagcgccaccgtgggagaggagaggctgctgtcactggtaccggatgcagaccccaccctgtctgcaggccacccccacctccctgcagctttgaggctggcggggtctgctcctgggaatggggtgggagccacagggacgacccggggcgggctgatgtcttcttgggggcagaccagagagctcaagtttcagagtcagaattaggcacttggagcgtttttgctggcttgcactttcttattttcttattttagagcgcttaaaaaatccggaaaaatggggtttaaaagaactgtctctttcagtctacatttttgtttaatacgcttgagcaataaacgctgacttgcagacgtgaaaaaaaaaaaaaaaaaaaaaaaactcga

SEQ ID NO: 201 - DNA, 845 bp, Homo sapiens
  misc_feature (1)..(1): n equals a,t,g, or c
  misc_feature (4)..(5): n equals a,t,g, or c
  misc_feature (823)..(823): n equals a,t,g, or c
  misc_feature (845)..(845): n equals a,t,g, or c
ntanntaatggcacatctccccttctattgggaacacaagctggagctccaccgcggtggcggccgctctagaactagtggatcccccgggctgcaggaattcggcacgaggtcaaggcaaaaatgggtcaggtttggagagttcccccactccttttgagtgttcaggttttccttaccatggctcatgctttccatcaagcaccagagttgcagtggcttggcctctggttctgggtgaggttatttgcaggtggagacggggggctgcacctgaacatttctagtgtcaccctccctctccttcatgggaaacagctctccagggaagtaccttcctgccaggggaagccaaggctgggccggccgccctacaaggagccacaggattgcagccatgggtgccacctttcatggaaggggagatttatgggctttcctggaacccccaggctgtcctggccaagaggaaagaggtggttacttcaggagtttgaccttagttagataactaaaagaatacatttcccctcccttttctttatttcctcaataaaaatgtacaaagtatcacccttctccatgccccaatctgtgttaaagtcacaatctatgggtgtagttctgggattctgtcaaattctccttcctgctctccaaaatggacaattgtcgtagggaccacatgcccccagaatacaatggcctctgtgktctactggggtcaagcctgctagaactcagcattcatgacaggggstaagtgtgcatgaaktgacactgactacagstargaaagccaggcgcacaaatgsccctttcnccccaagggccggtctttccan

SEQ ID NO: 202 - DNA, 738 bp, Homo sapiens
  misc_feature (3)..(3): n equals a,t,g, or c
  misc_feature (8)..(8): n equals a,t,g, or c
  misc_feature (566)..(566): n equals a,t,g, or c
  misc_feature (680)..(680): n equals a,t,g, or c
  misc_feature (684)..(684): n equals a,t,g, or c
  misc_feature (703)..(703): n equals a,t,g, or c
  misc_feature (715)..(715): n equals a,t,g, or c
  misc_feature (717)..(717): n equals a,t,g, or c
  misc_feature (731)..(731): n equals a,t,g, or c
ccnctgtnctggccctctatcatttgcctgcctttagacctgcctcaaggatatggcagcgctagcctttagctyccacagcacggatgggggtgatgccagttagaagtgggtagtgaacgtttgctgagctgttcactgtttmtctcttctctttggaagcacctctccgagccatgtgagccccctgatgccaccgagcaggggcagcttcatgaccgatgtctggctgaggctgtggcggacactctcggggttgtctgcaggagagcaagccaggaggacatgggcctggacgacacggcctcgcagcaaagtgtgtcagacgagcagtgacgggcgtgcggccgggcggggaggctggctcccccacacctcccacctgcattgctctccctcgtgctccccaaatcaccacaaccaaccaataccgcratccatgagggactcctcctgtggaaaaggagagctgttccagaacacagaactgatctcaggtttttgaaaaaaaaaaaaaaaaaactcgagggggggcccggtacccaattcgccctatagtgagtcgnattacaattcactggcgtcgttttacaacgtcgtgactgggaaaaccctggcgttacccaacttaatcgccttgcagcacatccccctttcgccagctggcgtaataagcgaanaggnccggaccgatcggcctttnccaacagttggngnagcctgaaatgggngaatggg

SEQ ID NO: 203 - DNA, 1145 bp, Homo sapiens
  misc_feature (9)..(9): n equals a,t,g, or c
  misc_feature (410)..(410): n equals a,t,g, or c
caggcagangggctgagtcacaggcacaggtgaggaactcaactcaaactcctctctctgggaaaacgcggtgcttgctcctcccggagtggccttggcagggtgttggagccctcggtctgccccgtccggtctctggggccaaggctgggtttccctcatgtatggcaagagctctactcgtgcggtgcttcttctccttggcatacagctcacagctctttggcctatagcagctgtggaaatttatacctcccgggtgctggaggctgttaatgggacagatgctcggttaaaatgcactttctccagctttgcccctgtgggtgatgctctaacagtgacctggaattttcgtcctctagacgggggacctgagcagtttgtattctactaccacatagatcccnttccaacccatgagtgggcggtttaaggaccgggtgtcttgggatgggaatcctgagcggtacgatgcctccatccttctctggaaactgcagttcgacgacaatgggacatacacctgccaggtgaagaacccacctgatgttgatggggtgataggggasatccggctcagcgtcgtgcacactgtacgcttctctgagatccacttcctggctctggccattggctctgcctgtgcactgatgatcataatagtaattgtagtggtcctcttccagcattaccggaaaaagcgatgggccgaaagagctcataaagtggtggagataaaatcaaaagaagaggaaaggctcaaccaagagaaaaaggtctctgtttatttagaagacacagactaacaattttagatggtaaggttcacaaataggttgatttctttcttcagctttctgacatgtccagcccatctctaatgaggactcccagatcatcactttatggctgttargtgtttcccatatgaaattagaggagctgggtcagggagacaaaagtcttctattagtcttatggatagctcctccttgagtgtattttgtgcaaaagattaagaagctggactctactgccattaaagctgagagaatcctaaggttatttgtggcttcggggttatatttattactactactactaataaatattcaacaagtaaataaatcttttttaaatca

SEQ ID NO: 204 - DNA, 4909 bp, Homo sapiens
  misc_feature (2488)..(2488): n equals a,t,g, or c
  misc_feature (2493)..(2493): n equals a,t,g, or c
  misc_feature (2512)..(2512): n equals a,t,g, or c
  misc_feature (2523)..(2523): n equals a,t,g, or c
gcgtccggtggtggcggcggcgcaagggtgagggcggccccagaaccccaggtaggtagagcaagaagatggtgtttctgcccctcaaatggtcccttgcaaccatgtcatttctactttcctcactgttggctctcttaactgtgtccactccttcatggtgtcagagcactgaagcatctccaaaacgtagtgatgggacaccatttccttggaataaaatacgacttcctgagtacgtcatcccagttcattatgatctcttgatccatgcaaaccttaccacgctgaccttctggggaaccacgaaagtagaaatcacagccagtcagcccaccagcaccatcatcctgcatagtcaccacctgcagatatctagggccaccctcaggaagggagctggagagaggctatcggaagaacccctgcaggtcctggaacacccccctcaggagcaaattgcactgctggctcccgagcccctccttgtcgggctcccgtacacagttgtcattcactatgctggcaatctttcggagactttccacggattttacaaaagcacctacagaaccaaggaaggggaactgaggatactagcatcaacacaatttgaacccactgcagctagaatggcctttccctgctttgatgaacctgccttcaaagcaagtttctcaatcaaaattagaagagagccaaggcacctagccatctccaatatgccattggtgaaatctgtgactgttgctgaaggactcatagaagaccattttgatgtcactgtgaagatgagcacctatctggtggccttcatcatttcagattttgagtctgtcagcaagataaccaagagtggagtcaaggtttctgtttatgctgtgccagacaagatgaatcaagcagattatgcactggatgctgcggtgactcttctagaattttatgaggattatttcagcataccgtatcccctacccaaacaagatcttgctgctattcccgactttcagtctggtgctatggaaaactggggactgacaacatatagagaatctgctctgttgtttgatgcagaaaagtcttctgcatcaagtaagcttggcatcacaatgactgtggcccatgaactggcccaccagtggtttgggaacctggtcactatggaatggtggaatgatctttggctaaatgaaggatttgccaaatttatggagtttgtgtctgtcagtgtgacccatcctgaactgaaagttggagattatttctttggcaaatgttttgacgcaatggaggtagatgctttaaattcctcacaccctgtgtctacacctgtggaaaatcctgctcagatccgggagatgtttgatgatgtttcttatgataagggagcttgtattctgaatatgctaagggagtatcttagcgctgacgcatttaaaagtggtattgtacagtatctccagaagcatagctataaaaatacaaaaaacgaggacctgtgggatagtatggcaagtatttgccctacagatggtgtaaaagggatggatggcttttgctctagaagtcaacattcatcttcatcctcacattggcatcaggaaggggtggatgtgaaaaccatgatgaacacttggacactgcagaggggttttcccctaataaccatcacagtgagggggaggaatgtacacatgaagcaagagcactacatgaagggctctgacggcgccccggacactgggtacctgtggcatgttccattgacattcatcaccagcaaatccgacatggtccatcgatttttgctaaaaacaaaaacagatgtgctcatcctcccagaagaggtggaatggatcaaatttaatgtgggcatgaatggctattacattgtgcattacgaggatgatggatgggactctttgactggccttttaaaaggaacacacacagcagtcagcagtaatgatcgggcaagtctcattaacaatgcatttcagctcgtcagcattgggaagctgtccattgaaaaggccttggatttatccctgtacttgaaacatgaaactgaaattatgcccgtgtttcaaggtttgaatgagctgattcctatgtataagttaatggagaaaagagatatgaatgaagtggaaactcaattcaaggccttcctcatcaggctgctaagggacctcattgataagcagacatggacagacgagggctcagtctcagagcgaatgctgcggagtgaactactactcctcgcctgtgtgcacaactatcagccgtgcgtacagagggcagaaggctatttcagaaagtggaaggaatccaatggaaacttgagcctgcctgtcgacgtgaccttggcagtgtttgctgtgggggcccagagcacagaaggctgggattttctttatagtaaatatcagttttctttgtccagtactgagaaaagccaaattgaatttgccctctgcanacccnaaaataaggaaaagcttcnatggctactanatgaaagctttaagggagataaaataaaaactcaggagtttccacaaattcttacactcattggcaggaacccagtaggatacccactggcctggcaatttctgaggaaaaactggaacaaacttgtacaaaagtttgaacttggctcatcttccatagcccacatggtaatgggtacaacaaatcaattctccacaagaacacggcttgaagaggtaaaaggattcttcagctctttgaaagaaaatggttctcagctccgttgtgtccaacagacaattgaaaccattgaagaaaacatcggttggatggataagaattttgataaaatcagagtgtggctgcaaagtgaaaagcttgaacgtatgtaaaaattcctcccttgccaggttcctgttatctctaatcaccaacattttgttgagtgtattttcaaactagagatggctgttttggctccaactggagatacttttttcccttcaactcattttttgactatccctgtgaaaagaatagctgttagtttttcatgaatgggctatcgctaccatgtgttttgttcatcacaggtgttgccctgcaacgtaaacccaagtgttgggttccctgccacagaagaataaagtaccttattcttctcattttatagtttatgcttaagcacccgtgtccaaaaccctgtaccccatgtttatcattcataaactgtttcatcagtctcctcgaaagactctgaatagtcgactactgaacaatgaacacctggatctgagactaagccggacgatgactgggttaaagctctcccggctcacccctccagacccgctgcccatccctcttccttgctccatgcccaggggctgacttgtaaaggccaagtcatcaagctttcttgccctttggatgttggtcagtggggagccggagagctggagctggggtcggaggaggtagtaggtggaggtgttcttccctgattcccttgcgggatgcctcgggctggcctcccctgagggtcttagctccgagaggggaccctcttttccacacagccttctccacctctggattttggtaactgctccctcctcatcccttcaggattagtggcctcagtgggagtctggcttttactagtcctggcggacttgtggtttctacataatgtgctcgcacttttgcaaaaaatctttttatagaaccctcctcagataattctgagtgtctgtcatctatttccctgactggtacagtatctcttctgaaaaagcagagtgcattcaagtctgtaggaaaacccttttcttagggaggtgattttttttctctctctgcttcttatttggcctactttacaatttctaactaactagttattggcatttactgacagtaaattattgcagtcaccaataaatgatagtacattgtgaaacaaaatatttgctcatattagcaaataggacattctttggctttgaagtctttcttttgtgaagacttcacacacggttgcttcagcacacagttgctgctcaggttttatgtatagatgataataatagaaagcacagtttactaacatggtaaaccaacggagttcaagtcaagtcagttaataccctaagaattagattttatttcttattctgaaaacttgctacacagggacttatctaacccatagtgtgctctgttgctgacttgattcaagttgcagcgtgttttgcgctgactctaaggtgcggaaatcctcacacctggcaaaggagaattcaaactgaactttttgaatataaggcaaaaacttcaagataagggaatatgattgatgattggtacgaaaaatgtcaaaaatgtgttcccctaatacacgacaaaatagagtgacttctggacataaatctgccatttattaaaccattcactacaacaaataaataggtataaaagtggaattggaatttttatacttatttgttgtagtgaatggtttaataaaaatagaaatcactggtaatttccaccccaaactaaactatttcccttcttttaaaaaaatacacaaccaagattttaatgtaaaatattttgctttaattgtattttatgccttgattaatgaaacatggaaatattgattttcagttttggtcacctgaggaacctatctttgtttgcttttggaaaagcccattttctaaacagatacaatattgccacaacaatgtgcagaaacctttttgataataaaaaattgttctttgcctctaaaaaaaaaaaaaaaaaaaaaaaaaaaaaaaaaaaaaaaaaaaaaaaaaaaaaaaaaaaaaaaaaaaaaaaaaaaaaaaaaaaaaaaaaaaaaaaaaaaaaaaaaaaa

SEQ ID NO: 205 - DNA, 2921 bp, Homo sapiens
ccacgcgtccggatttctgaggttctgcaaacaggccaccctgcagttctgtgtggtgaagccactcatggcggtcagcactgtggtcctccaggccttcggcaagtaccgggatggggactttgacgtcaccagtggctacctctacgtgaccatcatctacaacatctccgtcagcctggccctctacgccctcttcctcttctacttcgccacccgggagctgctcagcccctacagccccgtcctcaagttcttcatggtcaagtccgtcatctttctttccttctggcaaggcatgctcctggccatcctggagaagtgtggggccatccccaaaatccactcggcccgcgtgtcggtgggcgagggcaccgtggctgccggctaccatgacttcatcatctgtgtggagatgttctttgcagccctggccctgcggcaccccttcacctacaacgtctatgctgacaagaggctggacgcacaaggccgctgtgcccccatgaagagcatctccagcagcctcaaggagaccatgaacccgcacgacatcgtgcaggacgccatccacaacttctcacctgcctaccagcagtacacgcagcagtccaccctggagcctgggcccacctggcgtggtggcgcccacggcctctcccgctcccacagcctcagtggcgcccgcgacaacgagaagactctcctgctcagctctgatgatgaattctaggtgcgggctgcagtggcggaagtgctggcgccatagccacggtcaggctgtgccccacctccagcctcaccaccaggccaggaggcagctggcacagtgctcacgccgcctttatttattggaccagaaacactcacatgtcgcttccagaggaacgggggacagccaggctcgcccatgggccttcaggaatatttatacatggcccagcctgcactgcccgggcgagggcagaggacactgggagcaaggcttatgcccctgctgcccgtcctgtgctgggggcatgctgggaccagccgcacccaggccccaatgcttgtgtgtggaccagcggctgcagccttctagcccctcctccccgcgagactctcaggctgaggtcggcaagccgtggctcccccacacaccgtgcaataccctgtctgacctgggctcttcccgcctgcatcccttccctgtccacctttgtccagtgctagattcacctcaccccgggcaggagtggggatgtgggcgctctgtggtcctcccctcctgacccaggcctctgtggcatgctgcaaggatcagagccagacaccaggagtcacaggccccacccaggaagggcattcagggcccctgggcaccgcttctgttgaagcaggggcttctgggcccctgggtatccccacctgtcgtggccacacctctgcctgcctcatgccccttcccctggcctaccaaggacagcccacagcccgcactgccggctcacttgggtccttcctcgatagctttgggcagagcccttgcttcctggctgcttcagggctcaggggctcccagccctccttcccaggctgatgctgggtcctctctctctttggggcttctccctcccgtttcaggggaaaggtctgagtctccacgtttcagaccagcttctgggggaaggcagtccggcagggagaccgggaggggtggccacacagtggggagctgggaggtggggggaatggtcccagactcctctcggggcccctatccacacagggcctggtgttctaccccatctggcccctggcccatctcttctgtgccttagtcacatatgaaagcgcccctccctggctccccatctgtcccacacgctccctggggctcttagttcagctgctggcactcgcaggatcctgcagtgctgggcccagagcccttggacaggcctcaggagtggtcaggaccaccaagcccctcctctccccctccacacctctagacctggggcctccggaacccccagcaggctgggcttatactagctcctgacttaggaagagcctcgtgtcacaacacgtgtccctacaggcaaagtgtcctggcatttaaaacccagattatccctgggtttgggctgcagtcacctggagaagctggtagggtaagggagagggaccctgccggtgttcatggggattctttcttttggtccttcctggaatgaacaggttccctccctgccacctgtgaggagagttggggcccagccgtcttcctggcctccttcctttcctcgtggcagaggcctgcatgtgggtgccagaggccagctctccccctccatcttgggggggcggagcagttgggcccaagctgcccgggagggtgggtgcagacacaggctgaggaccagccctggccctgccccgccatctgctttcaccaagctgtctctccaccgtggcttcccttctccctccaggccaaagtgctgctgattcccactcccttggttttcgcctgcccagcgttgctgtttgcgtggagggtggggggagctcagtggcagggaatcagcggtccgtggggtcgtggggacgggaacatgtgcccgaccgctccatcccctcctcctccttaggatgcataacctaccttgtctttttttttttaattttctttccaggtagagtagctctttgtacataaagaatacttgaaaaattaattgtatgatgtatgagaagacagagtctcctagttttgtatcttgttgtatgactgccatgagttccaccagaaagccactctattttggtctctgtgacattttaaatgcgtgacagaagtgagcaaataaagtgaggaagaaatctaaaaaaaaaaaaaaaaaaaaaaaaaaaaaaaaaaaaaaaaaaaaagg

SEQ ID NO: 206 - DNA, 1259 bp, Homo sapiens
  misc_feature (4)..(4): n equals a,t,g, or c
  misc_feature (18)..(18): n equals a,t,g, or c
gggntacaaaagctgganctccaccgcggtggcggccgctctagaactagtggatcccccgggctgcaggaattcggcacgagtccacacagggcctggtgttctaccccatctggcccctggcccatctcttctgtgccttagtcacatatgaaagcgcccctccctggctccccatctgtcccacacgctccctggggctcttagttcagctgctggcactcgcaggatcctgcagtgctgggcccagagcccttggacaggcctcaggagtggtcaggaccaccaagcccctcctctccccctccacacctctagacctggggcctccggaacccccagcaggctgggcttatactagctcctgacttaggaagagcctcgtgtcacaacacgtgtccctacaggcaaagtgtcctggcatttaaaacccagattatccctgggtttgggctgcagtcacctggagaagctggtagggtaagggagagggaccctgccggtgttcactggggattctttcttttggtccttcctggaatgaacaggttccctccctgccacctgtgaggagagttggggcccagccgtcttcctggcctccttcctttcctcgtggcagaggcctgcatgtgggtgccagaggccagctctccccctccatcttgggggggcggagcagttgggcccaagctgcccgggagggtgggtgcagacacaggctgaggaccagccctggccctgccccgccatctgctttcaccaagctgtctctccaccgtggcttcccttctccctccaggccaaagtgctgctgattcccactcccttggttttcgcctgcccagcgttgctgtttgcgtggagggtggggggagctcagtggcagggaatcagcggtccgtggggtcgtggggacgggaacatgtgcccgaccgctccatcccctcctcctccttaggatgcataacctaccttgtctttttttttttaaattttctttccaggtagagtagctctttgtacataaagaatacttgaaaaattaattgtatgatgtatgagaagacagagtctcctagttttgtatcttgttgtatgactgccatgagttccaccagaaagccactctattttggtctctgtgacattttaaatgcgtgacagaagtgagcaaataaagtgaggaagaaatctatatatgagataatatagattgtattgaaaaaaaaaaaaaaaaaaaaaaaaaaaaactccga

SEQ ID NO: 207 - DNA, 1314 bp, Homo sapiens
atgcggcagctcttctatgaccctgacgagtgcgggctgatgaagaaggggggcttgtacttcagtgacttctggaataagctggacgtcggcgcaatcttgctcttcgtggcagggctgacctgcaggctcatcccggcgacgctgtaccccgggcgcgtcatcctctctctggacttcatcctgttctgcctccggctcatgcacatttttaccatcagtaagacgctggggcccaagatcatcattgtgaagcggatgatgaaggacgtcttcttcttcctcttcctgctggctgtgtgggtggtgtccttcggggtggccaagcaggccatcctcatccacaacgagcgccgggtggactggctgttccgagggccgtctaccactcctacctcaccatcttcgggcagatcccgggctacatcgacggtgtgaacttcaacccggagcactgcagccccaatggcaccgacccctacaagcctaagtgccccgagagcgacgcgacgcagcagagccggccttccctgagtggctgacggtcctcctactctgcctctacctgctcttcaccaacatcctgctgctcaacctcctcatcgccatgttcaactacaccttccagcaggtgcaggagcacacggaccagatttggaagttccagcgccatgacctgatcgaggagtaccacggccgccccgccgtgccgcccccgttgatcctcttcagccacctgcagctcttcatcaagagggtggtcctgaagactccggccaagaggcacaagcagctcaagaacaagctggagaagaacgaggaggcggccctgctatcctgggagatctacctgaaggagaactacctccagaaccgacagttccagcaaaagcagcggcccgagcagaagatcgaggacatcagcaataaggttgacgccatggtggacctgctggacctggacccactgaagaggtcgggctccatggagcagaggttggcctccctggaggagcaggtggcccagacagcccgagccctgcactggatcgtgaggacgctgcgggccagcggcttcagctcggaggcggacgtccccactctggcctcccagaaggccgcggaggagccggatgctgagccgggaggcaggaagaagacggaggagccgggcgacagctaccacgtgaatgcccggcacctcctctaccccaactgccctgtcacgcgcttccccgtgcccaacgagaaggtgccctgggagacggagttcctgatctatgacccacccttttacacggcagagaggaagga

SEQ ID NO: 208 - DNA, 468 bp, Homo sapiens
gtgagaagataatcctgagaggctgcatcctgagaaataccagctggtgttttggaatggttatttttgcaggtcctgacactaaactaatgcagaatagtggtaagacaaagtttaaaaggacaagcattgatagattgatgaatactctagtactatggatttttgggtttctgatatgcttgggaattattcttgcaataggaaattcaatctgggagagtcaaactggggaccaattcagaactttcctcttttggaatgaaggagagaagagctctgtgttctccggattcttaacattctggtcatatattattattctcaatacagttgtacccatttccttatatgtgagtgtggaagtaattcgtctaggacacagttattttataaactgggaccggaagatgtattatyctcgaaaagcaatacctgcagtggctcgaacgaccacgctcaatgagg

SEQ ID NO: 209 - DNA, 181 bp, Homo sapiens
  misc_feature (178)..(178): n equals a,t,g, or c
ggtcagtgtgcagatagccttggataccagktactggactttcattaatcacgtcttcatctgggggagcattgccatttatttctccattttatttacaatgcacagtaatggcatctttggcatcttcccaaaccagtttccatttgttggtaatgcacgacattccctgacccanaag

SEQ ID NO: 210 - DNA, 612 bp, Homo sapiens
  misc_feature (47)..(47): n equals a,t,g, or c
  misc_feature (534)..(534): n equals a,t,g, or c
  misc_feature (537)..(537): n equals a,t,g, or c
  misc_feature (563)..(563): n equals a,t,g, or c
  misc_feature (565)..(565): n equals a,t,g, or c
  misc_feature (591)..(591): n equals a,t,g, or c
cagtctgggcttaagaaaccaccagaagaacccaaaccagaaatgcncaagtgtaaatgcaaaaattcttatagaagaaatagcataagaatttgcacattcggaaataagaccaccttccatgaacaaggagaagcctttggagatatctaaactgtgcaaatgaatagtcgctggctaagactgcttgcaatccttcctggccgctgatgccaacaccaatgtgagcacttttaatcatgctgacatcattggctccatcwccaatggccaaagtaacagcatttctgtacttcttcaccagctctaccacttgggctttctggagtggagtgaccctgcagcaaattacagtcttacacatgcaagcaagttctaggagatcattcttgacatcactttctagggcatgagccaaactgtggccatttatgattaaggcataatctcctgttatggtttcttctacaatagaatccaactccagctgctgctttttttcacaaactacatggccattggaaaaatttctgnttngtccaaacaaattttgttttgaaatnangagttcttctctcacttccacagcanttattccctgctatagggagg

SEQ ID NO: 211 - DNA, 1024 bp, Homo sapiens
  misc_feature (29)..(29): n equals a,t,g, or c
  misc_feature (986)..(986): n equals a,t,g, or c
tgctttcctgagttcttctctcacttccncagcattattccctgctatcccaaacmcatcattcatgtcgtcagtcagcatgttgcaggcataaccgatgttgatgscagtttcttgtttgtctcctgttaggacccagatcttaatattggctagtgataaacttgtaactgtttcaataacaccctcctgtaacttatcttctacagcagtggcacctagtagcatcaaatctctttcaatttcttcatatagcccagctattcgttcatccctctcttctgtggcaacattcgcatcttcaagcatcttatgccactctttaaagtacttgtcatccaggtctctgtatgcgatggccaaggtccgaaggccttcccctgcaaattcactgaggtggtctgacgtcaaagacaaaaggacttcattggaaggatsaagtttctcaaacagaatagtatctgctcctttggaataaagctttatctgtccttctgggtttcgarctatgacagacatcctttttctggtgttgttgaaatccaaaaaggcaagtaattgataagtaactagtgttcccaattcttctattgttatggtctctggggtccgggatttaaaratgaacccaaaatttctagcggcagtcactagagccccttcatcaggtgactgaacttggtaaatcagctctcctgcgctattctcttctgacattacagtgtggcagagagcaagtaacctaaggaattcatgaactttgggatcacccattttaatggattccatcagattgtggtcaaagaactgaaattctctatccgcttgagatttgactgagaaatccacaggctctttttcctgagttatttctgtcttctgatccaggtcatcatgtacttcaccatagattctcccattaatggaacatcttttaaaggtcatgatgttttgagtgagggtacccgttttgtcggagaaaatgnactcaatctgccccagttcttcattgagcgtggtcgtt

SEQ ID NO: 212 - DNA, 366 bp, Homo sapiens
gacgcgtgggagctcattatccatcaaactcactcargtgwcacytgagtgagtttgatggataatgagctaatgtgatatctataggtcacaattttttaaaaccaaaattttcaagtctgggataatctttcctaaatgggatcaaatgaaataatatgtgtaaaagagtcaaatgcagtcctttaccatagtaactgcctatggacgttgtctttcccttacatgcctgcctacacttaaccagatgttggttttcaagtctaatktgtcattagtttcaccacattkgctcacttttkgtaacatttttgcaagatttgaaaactttcagtaaatgttttggcactattggtaaaaaaaaaa

SEQ ID NO: 213 - DNA, 519 bp, Homo sapiens
  misc_feature (371)..(371): n equals a,t,g, or c
cctggttagggtcctacagggaaataaaattataaccgtggaggtacatttctctaccagaaagcaaaaataaagcatcatgtcttaatggttttctacaaatcaacttctaattctacagagtccttaatctggtccctattaaattcttggtcagacaaagttacatttcccaagagagtcaggtgacacttgagtgagtttgatggataatgagctaatgtgatatctataggtcacaattttttaaaaccaaaattttcaagtctgggataatctttcctaaatgggatcaaatgaaataatatgtgtaaaagagtcaaatgcagtcctttaccatagtaactgcctatggacgttgtctttccctnacatgcctgcctacacttaaccagatgttggttttcaatgtctaatttgtcattagtttcaccacatttgctcactttttgtaacatttttgcaagatttgaaaactttcagtaaatgttttggcactattggtaaaaaaaaaaaaaa

SEQ ID NO: 214 - DNA, 2042 bp, Homo sapiens
  misc_feature (2001)..(2001): n equals a,t,g, or c
ggtcagctttcatctcgtcctatctttgttcaggcaaacttctctagttctgttttaataggcatatttgttaggtctgttttttgaaatcctcttttttacattgtttaaagataatgccttggctaaaaagcctgcttcacttttccctgtttttagttgttttctccacattggcagtaaagagccttggcgtcccagtagcagcaggttctcctttttgtattgtggatgttttgcatttcatactgttgtgaagagtggctttgatcatacatgttgttggtatatttgccyttttgctgggggtgtgagaagaaccagagatgagcagaggtacacccagtagacttcccagcctgcagagcctcccgggaagagcttccgtgttcaggtgcttggggccccwccctaggagcctgwctcwcagtcagagcwgggtcccggcttgygttcaggattttgaaacatttgtawggtgattttgttgtttctacacctttctcctcatctttttttttttgtagttaatcgttactaataacagaaaagacatttttggcatggtaattggcacaaagtgaataattgttgaatagatgacttttgaggctttcaaaattcgagtgtccataaaatccatccagagccacctggttcctttttttgaaccacttaacgtaattctggaaaaccttgactgtgggtcttaagtttggtggattgctgcttctcactggctgacctttggaggtcgcatatttcaggatgtgattccacttaggctccatttcacctgacactgcaattctgtgccttcagagggatttgttattgcgaatgatgtggacaacaagcgctgctacctgctcgtccatcaagccaagaggctgagcagcccctgcatcatggtggtcaaccatgatgcctccagcatacccaggctccagatagatgtggacggcaggaaagagatcctcttctatgatcgaattttatgtgatgtcccttgcagtggagacggcactatgagaaaaaacattgatgtttggaaaaagtggaccaccttaaatagcttgcagctacatggcttacagctgcggattgcaacacgcggggctgaacagctggctgaaggtggaaggatggtgtattccacgtgttcactaaaccctattgaggatgaagcagtcatagcatctttactggaaaaaagtgaaggtgctttggagcttgctgatgtgtctaatgaactgccagggctgaagtggatgcctggaatcacacagtggaaggtaatgacgaaagatgggcagtggtttacagactgggacgctgttcctcacagcagacacacccagatccgacctaccatgttccctccgaaggacccagaaaagctgcaggccatgcacctggagcgatgccttaggatattaccccatcatcagaatactggagggttttttgtggcagtattggtgaaaaaatcttcaatgccgtggaataaacgtcagccaaagcttcagggtaaatctgcagagaccagagaaagcacacagctgagccctgcagatctcacagaagggaaacccacagatccctctaagctggaaagtccgtcattcacaggaactggtgacacagaaatagctcatgcaactgaggatttagagaataatggcagtaagaaagatggcgtgtgtggtcctcctccatcaaagaaaatgaagttatttggatttaaagaagatccatttgtatttattcctgaagatgacccattatttccacctattgagtaaggattcagcctttttaattattcatttaaagaaatttactatagagtatcaaatgtacaactgatcacatgtaaccattgttttgtatgtagttctgtctagcttttttttttttttaacctttttaactgcatattagagcaggatgaaactttagaggttactcaatcttttaatttaaggagaaagtaaacanttactttgtgaacatgatagataaaaaaaaactggaccggg

SEQ ID NO: 215 - DNA, 308 bp, Homo sapiens
ggaggcaggaccttgtcctattcattaatcttgcccctcaacagttattttcagaggggcaagaagtgtttcagggttcttggcccttgtttgaccagtcgtcctaaccctcrtgtcttgggtcattgttgttrtaatctggggttaccttttggaaggtcatggggtacccttttgcaaaagttatgggccctmtccttggaaactgcacacacaccatgcagcttacaattcagggagttcacaggtctacagaatcctgggaaactctccatgtccggttctaatccattgtagcttcagtggga

SEQ ID NO: 216 - DNA, 1568 bp, Homo sapiens
  misc_feature (1550)..(1550): n equals a,t,g, or c
  misc_feature (1564)..(1564): n equals a,t,g, or c
ctcatcagccctatgaggtagggaggtaggtattattatcacccttgttagtttttttgttttgttttgttttccagatgagagaatcattgctcacagaagtgaagtaacttttccaaggtcatacaatcagtaagtggcaggcaaggactgaaatccaagttgttaccctccaaagtccctgctctgagaactggaggaattctttatcaaatctaaaatcctcttttagscctgtctgctttaatattccggtctttattgatccttctcttctctaaamcttcagctgtcagtataaaaatcaaggaatttagcmcttgttattgtgtgamcagcttcttgtctctcctgtactgtaagtgggtctagggatttttattctttaaatatccccctgtactcagtagatctttgggagamcaagctcataggcttctaataattctttctttgactgccagctgaattagacagaaggtaagtcctgctgccgtgtcgtgcctaaccccatctttatttcctgtgctgttagagaacagtcttttcttggctggaacaaatactacagcctgctcaactagctaatatgtattgagttcttartatgttccaaggactgctctaagtattttatatatattaactcactgaatcttaaataccctatgagctaagtcctatttttatccccattttacaaaagaggaaactgaatgtaccagtgcatcagtatttgactgagtaaatgaatgactgctttgctgatggatagtattattagcaacaaccctacaaatatgatgttatgtttgcatcatgcagtacagctttatgtaccttatgtcattgtcactcatgattagcaaataggcacgaacatccctattttatagaagaggaamccatggctctaagagggtgagtgattctcaacagtcacatgccatctgtatccttcagtaaacaaggtatttggtccattccaggatcgggggcaagagagatgggagggcctcggtgagaaacactcatattcacaaaaggtactagatagatagacagataaataaataaatagagataaaagctagtaatagcagagatttgatgggaattcagatctttgattcctagtccagtgctctttcttttatgtaaggtgatgggaagcaagtcttaggtccagatctggcagctgctttgatttaggatcttaagccagaagcagcagcgccctaaacaaaaagcatcattttaacttctctgcatttctcacattctcaacaatgaccatgccctactttcataattaaaaacaaacaaataaacagagggggcaaaatgcatccttctgagtgggctggggcttgtagagggattcttgggtttgctctgggatgtctttgggcccctgcacttgtgggcactctgatttatccccacaggccacctggcccaccttatgggctgaggagggcttgatgggcggaggsaagcagagctgaggagctggggaggagctggaaaggactgctagaaggttccantgaagctacaatgngtag

SEQ ID NO: 217 - DNA, 865 bp, Homo sapiens
  misc_feature (13)..(13): n equals a,t,g, or c
  misc_feature (20)..(20): n equals a,t,g, or c
accgcagcctgcngggctcnagcattcctytsgcytcagcctcctgaktagctgggaccmcagytccactaattttgaagttttttkggtagacatgaagtctccctgtgttgcccgggctggtctcaaactcctgacctcaagcagtcctcctgtcttggcctctggaaatgctgggattacaggcgtgagccactgtgctggcctcttttttctttttctttttttttaaggtttttatttgttaaatgggaagtctgtgccatcaactgagcattgtattttctccttagtaagagcctgggtgggccactgggagagaactatacattaaatgtaagtagcctctgggtagagagcccctggctggtttcctttcctttctctccttttctctactttggtgtctggaggcatttcccagactccagtttcttaccaccctcacggattttgctattgtattatcacctcctttatcattcccaaaattgactttatggagactcattaaaagaaagaatcatcggccgggagcgtkgctcacgccacgaaggcgggcgaatcacctgaggtgcggagttcgtgaccagcctgaccaaaacagagaaaccccatctctactaaacaatacaaaattagctgggcgtggtggtgcacgcctgtaatcccagctactggggaggctgggacgggagaatcacttgaacccgggaggcagaggttgcagtgaccaaagatcgcactattgcactccagcctgggcaacaagagcaaaactctatctcaaaaaaaaaaaaaaaaaaaaaaaaaagggcggccgctctagaggatccctcgaggggcccaagcttaggcgtgcatg

SEQ ID NO: 218 - DNA, 1687 bp, Homo sapiens
  misc_feature (1568)..(1568): n equals a,t,g, or c
  misc_feature (1652)..(1652): n equals a,t,g, or c
  misc_feature (1654)..(1654): n equals a,t,g, or c
  misc_feature (1660)..(1661): n equals a,t,g, or c
ccacgcgtccgggcagtggggtgagggcacacaagcagttcagggtcccagcaggaagtggggctgcagggccggggtgggtcctgggcctggccatcaggcagcctagcaggttgttctgggcatggagggggcctggtgtggctgagggcatgcccagggctccctggaggatcccgctctgtgccctgcccaccctgtgcctggggagccctctgccctcacagcccacccaccccattttctatgaccacagagctccgacctggaagatggctcacccaggaggtcccaggagctctcactcccccaggggacctggaggacacccagctctcagacaaaggctgccttgccggcggggggagcccgaaacagccctttgcagctctgcaccaggagcaggttttgcggaacccccatgtaaggcttccccggggtggggtcctcccagccgtgggcctcagggtgaccgatcacagggagagtggctccctgccctgggcaccccctgcggtggccccgacgacagctgaggagtgaccacaaggtctctgcccacagtgctcggggtgcggtgtctgggctgcgaagtggatccccctcctttcttgggcactgcagcagcttggggggctttttggacgtggatgtgcctggtcctggtttcccgagggcctttacagtggatgaggaggtgaacacagggagtcctgagagcaagcaccacctcgggctttggtgtagaaacaatggcccggaccccaggccggagccgtggcttggcctcctgggtgtgtcttggcatctgaaatgcaggctacccacaccggctcacctccaggggtacaggcaggtcccacagggagagcttggcgctgagctgaggctgtctgggctcctcgcctcccaaccagtctgcagttacaggggccagtggatgggcgggtgagaaggacgggttccctcaggggagccggccggagcccgagccttcccccttctccaggacgcaggcctgagcagcggggagccgcccgagaaggagcggcggcgcctcaaagagagttttgagaactaccgcaggaagcgcgccctcaggaagatgcagaaaggatggcggcagggtggaggaggaccgggagaacaccacgggcagcgacaacaccgacactgagggctcctagccgcagcagccgcaggccccgaccagggcacacccaccggcccggcctcctgccacccgggggtgccgacgccctggggcgcagacttccccgagccgtcgctgacttggcctggaacgaggaatctggtgccctgaaaggcccagccggactgccgggcattggggccgtttgttaagcggcactcattttgcggaggccatgcgggtgctcaccacccccatgcacacgccatctgtgtaacttcaggatctgttctgtttcaccatgtaacacacaatacatgcatgcattgtattagtgttagaaaacacagctgcgtaaataaacagcacgggtgacccgcaaaaaaaaaaaaaaaaaaaaaaaaaaaaaaaaaanaaaaaaaaaaaaaaaaaaaaaaaaaaaaaaaaaaaaaaaaaaaaaaaaaaaaaaaaaaaaaaaaaaaaaaaaaaaaaaaaaaananaaaaannaaaaaaaaaaaaaaaaaaaaaaaaaa

SEQ ID NO: 219 - DNA, 570 bp, Homo sapiens
  misc_feature (5)..(5): n equals a,t,g, or c
  misc_feature (16)..(16): n equals a,t,g, or c
  misc_feature (496)..(496): n equals a,t,g, or c
  misc_feature (523)..(523): n equals a,t,g, or c
  misc_feature (531)..(531): n equals a,t,g, or c
ttccngtgccactatngaatgtacgcctgcaggtaccggtccggaattcccgggtcgacccacgcgtccgggcagtggggtgagggcacacaagcagttcagggtcccagcaggaagtggggctgcagggccggggtgggtcctgggcctggccatcaggcagcctagcaggttgttctgggcatggagggggcctggtgtggctgagggcatgcccagggctccctggaggatcccgctctgtgccctgcccaccctgtgcctggggagccctctgccctcacagcccacccaccccatttwctatgaccacagagctccgacctggaagatggctcacccaggaggtcccaggagctctcactcccccaggacctggargacacccagctctcagacaaargctgccttgccggcggggggagcccgaaacagccctttgcagctctgcaccaggagcaggttttgcggaacccccatgtaaggcttccccggngtggggtcctccagccgtgggcctcanggtgaccnatcacagggagagtggctccctgtcctgggcaccccctg

SEQ ID NO: 220 - DNA, 1752 bp, Homo sapiens
  misc_feature (1099)..(1099): n equals a,t,g, or c
aaggtacgcctgcaggtaccggtccggaattcccgggtcgacccacgcgtccgtccaggacagagagtgcacaaactacccagcacagccccctccgccccctctggaggctgaagagggattccagcccctgccacccacagacacgggctgactggggtgtctgccccccttgggggggggcagcacagggcctcaggcctgggtgccacctggcacctagaagatgcctgtgccctggttcttgctgtccttggcactgggccgaagcccagtggtcctttctctggagaggcttgtggggcctcaggacgctacccactgctctccgggcctctcctgccgcctctgggacagtgacatactctgcctgcctggggacatcgtgcctgctccgggccccgtgctggcgcctacgcacctgcagacagagctggtgctgaggtgccagaaggagaccgactgtgacctctgtctgcgtgtggmtgtccacttggccgtgcatgggcactgggaagagcctgaagatgaggaaaagtttggaggagcagctgacttaggggtggaggagcctaggaatgcctctctccaggcccaagtcgtgctctccttccaggcctaccctactgcccgctgcgtcctgctggaggtgcaagtgcctgctgcccttgtgcagtttggtcagtctgtgggctctgtggtatatgactgcttcgaggctgccctagggagtgaggtacgaatctggtcctatactcagcccaggtacgagaaggaaytcaaccacacacagcagctgcctgactgcagggggctcgaagtctggaacagcatcccgagctgctgggccctgccctggctcaacgtgtcagcagatggtgacaacgtgcatctggttctgaatgtctctgaggagcagcacttcggcctctccctgtactggaatcaggtccagggccccccaaaaccccggtggcacaaaaacctgactggaccgcagatcattaccttgaaccacacagacctggttccctgcctctgtattcaggtgtggcctctggaacctgactccgttagacgaacatctgccccttcaggnaggacccccgcgcacaccagaacctctggcaagccgcccgactgcgactgctgaccctgcagagctggctgctggacgcaccgtgctcgctgcccgcagaagcggcactgtgctggcgggctccgggtggggacccctgccagccactggtcccaccgctttcctgggagaaygtcactgtggacaaggttctcgagttcccattgctgaaaggccaccctaacctctgtgttcaggtgaacagctcggagaagctgcagctgcaggagtgcttgtgggctgactccctggggcctctcaaagacgatgtgctactgttggagacacgaggcccccaggacaacagatccctctgtgccttggaacccagtggctgtacttcactacccagcaaagcctccacgagggcagctcgccttggagagtacttactacaagacctgcagtcaggccagtgtctgcagctatgggacgatgacttgggagcgctatgggcctgccccatggacaaatacatccacaagcgctgggccctcgtgtggctggcctgcctactctttgcctgcgctttccctcatcctccttctcaaaaaggatcacgcgaaagggtggctgaggctcttgaaacaggacgtccgctcgggggcggccgc

SEQ ID NO: 221 - DNA, 536 bp, Homo sapiens
  misc_feature (508)..(508): n equals a,t,g, or c
ggtcgacccacgcgtccgcccacgcgtccggcttccttaatgtaatttaaaccctggcaaacattctttagaaaccaagaggaaagaaagaacaaatatcaaaaaagacatagaatttaatattgatacaatttcacctctaaaatggatttgaagaaatgcaactttatatcaaaaaatgtcatctgatttcctttgtttcttttttaaattatgtaatcagatgattttatgtttttttttcaggggagcggaatattggtttcttttacttgttgttttcagttttctctgccattcatgtttcttttttgtgttcagtgtttcaaatacaatttgtatttaaggattttaaaataccaaactgtaactgagtacagtggatcgttttctgttaggatgttaatattatacaatgaaatctataaagtgttgtcaatttgattattgacacatataacatgtttacaaataaactgtggtattgatcaaaaaaaaaaaaaaaaancccggggggggccccggaacccaatccc

SEQ ID NO: 222 - DNA, 2409 bp, Homo sapiens
  misc_feature (694)..(694): n equals a,t,g, or c
  misc_feature (716)..(716): n equals a,t,g, or c
  misc_feature (755)..(755): n equals a,t,g, or c
  misc_feature (761)..(761): n equals a,t,g, or c
  misc_feature (791)..(791): n equals a,t,g, or c
  misc_feature (808)..(808): n equals a,t,g, or c
  misc_feature (880)..(880): n equals a,t,g, or c
ccacgcgtccggcgagacgcgttcaccaccatatgcactgttgtcaactcccctggagatgcgcccaagccccacaggaagccttcctcctctgcctcctcttcctcatcctcgtcctcgttctccttggatgcagccggggcctccctggccacactccctggaggctccatcctgcagccgcggccctccttgcccctctcctccacgatgcacttggggcctgtggtttccaaggccctgagtacctcttgccttgtttgctgcctctgccaaaacccggccaacttcaaggaccttggggacctctgtgggccctactaccctgaacactgcctccccaaaaagaagccaaaactcaaggagaaggtgcggccagaaggcacctgtgaggaggcctcgctgccgcttgagagaacactcaaaggtcccgagtgtgcagctgccgccactgccgggaagccccccaggcctgacggcccagctgacccggccaagcagggcccactgcgcaccagtgcccggggcctgtcccggaggctgcagagctgctactgctgtgatggccgggaggatgggggcgaggaggcagccccagccgacaagggtcgcaaacatgagtgcagcaaggaggctccggcagagcccggcggggaggcccaggagcactgggtgcatgaggcctgtgccgtgnggaccggcggcgtctacctggnggccgggaagctctttgggctgcaggaggccatgaaggnggccgnggacatgatgtgttccagctgccaagaagncggggccaccatcgggngctgccacaaaggatgcctccacacctaccactacccgtgtgccagcgatgcaggttgcatattcatcgaanagaacttttctttgaaatgtcccaaacataagaggctgccgtagtaatccaccccaacggccggaggagccgccggagcccgcctgcccgcccgccgccgaaggagaggagccgcctgcgcagcccccgggcctttgagctgctcccagcgctggtccagagccgatccttgatccgggtcccggatcgtggatccggccgcctagggctcagacttgcggccccgggttgggaggaaaacccgttccggagccgcctgctcccggaaccggacggcacagggcgttcttgcccaccccaggggccaggcttgcggagggggagcccgcggagcggccagactccccggggcgctcagcctccggcgagggtgggagacggctttgtcctggggacactttccctctggaatctcaagacgacgtggcacacattccacgtgggtgctgccgccaccccagtcggtcgtggcgtgcagctgggagccctgggcttgggggtgggggtcgaaacagtactggaagaggcggagggcggctcctagctccgtggactaggcgggggagaaaggaagcctttctgagagcgggctaggccggcactggagaggccggagcctttggaacaaaccgtgcggaacgcgtccaggggccttcccgcccagcctttgccagatctctcgtgcggttcgggcaaagccggggtagacctgggctatgctcagttaggggttgcgggatccccgagtgtgggcgggactgggacaccctttggcctctgtttgtcccctttccagtcctccaccccacccctggagcccagcctgggagcgcaaaacccaagaagcggccagaacgcacctccggctccggcggacgcgcgaccgttgtgcaccaccagggaccgccgcgcctactctgcacgggagcagggacagcgctagatttcgtgtacaaaacctgtgtacccctctatatatatgttacatagaatgtatatatgttgggaacatgctcgcttctcccgtgtgtcgccgccgtgcgtcgtgcgcccgcaacagagccccaaccgggcctttgccgggtaaggggctaccgcgacgccacttgtccacgcagccaccaccggcccgggccagtccctgccagtccgtccgcctgtccgtccgtgtcctcagctctgtccacgcttcgataggcctgacgcagcccccagcccagggccgccctagcaacttcctgtacatatgactgtaaaatggtaaacgtgtgtattatatctggcctcgttatatagtgtatatatatgtatacatatacatatatataatatatatgaagactgtaaatgttaagacgactagtgttcttattagtatattgcttcacactgaagattgtgtgtatcgagctgtttctaaaagatgtttattttccttaagagtaaaaaacagtcattgcattcagaaaaaaaaaaaaaaaaaaagtcaataaagatacaacgattgttttggaaaaaaaaaaaaaaaa

SEQ ID NO: 223 - DNA, 737 bp, Homo sapiens
  misc_feature (1)..(1): n equals a,t,g, or c
  misc_feature (21)..(21): n equals a,t,g, or c
  misc_feature (369)..(369): n equals a,t,g, or c
nagagggaagagagaaaaagntacaatgcttcgccgtycgsctktmcgkccsygtcctcagctctgtccacgcttcgataggcctgacgcagcccccagcccagggccgccctagcaacttcctgtacatatgactgtaaaatggtaaacgtgtgtattatatctggcctcgttatatagtgtatatatatgtatacatatacatatatataatatatatgaagactgtaaatgttaagacgactagtgttcttattagtatattgcttcacactgaagattgtgtgtatcgagctgtttctaaaagatgtttattttccttaagagtaaaaaacagtcattgcattcagaaaaaaaaaaaaaaaaaangtcaataaagatacaacgattgttttggaaaatctgcagcccgtggattccgaccagattcagctgggagccgggccaggctttaggttggggaatgggaatgaagggaggggctgggggggggggcatgaatggagtcagggagtcggcctttcacagaacaggaaacctcccccgcccctgtgccccctctccagtgtggcggcaggtcgggagggaggaggcttctttgctgtgagatgaccaggggccgggatgggggaggtgagacgtgccagacttcttgcagggagacccaagctgtagctcctgtcccacaacaggtcctggaagtcagtccatcctcccgtgccacccagggacctaat

SEQ ID NO: 224 - DNA, 1471 bp, Homo sapiens
  misc_feature (798)..(798): n equals a,t,g, or c
tttctgaatgcaatgactgttttttactcttaaggaaaataaacatcttttagaaacagctcgatacacacaatcttcagtgtgaagcaatatactaataagaacactagtcgtcttaacatttacagtcttcatatatattatatatatgtatatgtatacatatatatacactatataacgaggccagatataatacacacgtttaccattttacagtcatatgtacaggaagttgctagggcggccctgggctgggggctgcgtcaggcctatcgaagcgtggacagagctgaggacacggacggacaggcggacggactggcagggactggcccgggccggtggtggctgcgtggacaagtggcgtcgcggtagccccttacccggcaaaggcccggttggggctctgttgcgggcgcacgacgcacggcggcgacacacgggagaagcgagcatgttcccaacatatatacattctatgtaacatatatatagaggggtacacaggttttgtacacgaaatctagcgctgtccctgctcccgtgcagagtaggcgcggcggtccctggtggtgcacaacggtcgcgcgtccgccggagccggaggtgcgttctggccgcttcttgggttttgcgctcccaggctgggctccaggggtggggtggaggactggaaaggggacaaacagaggccaaagggtgtcccagtcccgcccacactcggggatcccgcaacccctaactgagcatagcccargtctaccccggctttgcccgaaccgcacgagagatctngcaaargctgggcggraaggcccctgracgcgttccgcacggtttgttccaaaggctccggcctytccagtgccggcctagcccgctctcagaaaggcttcctttctccyccgcctagtccacggagctaggagccgccctccgcctcttccagtactgtttcgacccccacccccaagcccagggctcccagctgcacgccacgaccgactggggtggcggcagcacccacgtggaatgtgtgccacgtcgtcttgagattccagagggaaagtgtccccaggacaaagccgtctcccaccctcgccggaggctgagcgccccggggagtctggccgctccgcgggctccccctccgcaagcctggcccctggggtgggcaagaacgccctgtgccgtccggttccgggagcagkcggctccggaacgggttttcctcccaacccggggccgcaagtctgagccctaggcggccggatccacgatccgggacccggatcaaggatcggctctggaccagcgctgggagcagctcaaaggcccgggggctgcgcaggcggctcctctccttcggcggcgsgcgggcaggcgggctccggcggctcctmcgrccgttggggtggattactacggcagcctcttatgtttgggacatttcaaaggggaattctct

SEQ ID NO: 225 - DNA, 3302 bp, Homo sapiens
  misc_feature (3274)..(3274): n equals a,t,g, or c
tcgacccacgcgtccgcgacccacgcgtccggggggaggtaactgcagtaagtcccgcttggccctggagtccacgcggattttcgaagctggggctggcaagaggccgctggacaccacgctccagtcgtcagcccacttcctagctgaacagcgcgaggcggcggcagcgagccgggtcccaccatggccgcgaattattccagtaccagtacccggagagaacatgtcaaagttaaaaccagctcccagccaggcttcctggaacggctgagcgagacctcgggtgggatgtttgtggggctcatggccttcctgctctccttctacctaattttcaccaatgagggccgcgcattgaagacggcaacctcattggctgaggggctctcgcttgtggtgtctcccgacagcatccacagtgtggctccggagaatgaaggaaggctggtgcacatcattggcgccttacggacatccaagcttttgtctgatccaaactatggggtccatcttccggctgtgaaactgcggaggcacgtggagatgtaccaatgggtagaaactgaggagtccagggagtacaccgaggatgggcaggtgaagaaggagacgaggtattcctacaacactgaatggaggtcagaaatcatcaacagcaaaaacttcgaccgagagattggccacaaaaaccccagtgccatggcagtggagtcattcayggcaacagccccctttgtccaaattggcaggtttttcctctcgtcaggcctcatcgacaaagtcgacaacttcaagtccctgagcctatccaagctggaggaccctcatgtggacatcattcgccgtggagactttttctaccacagcgaaaatcccaagtatccagagktgggagacttgcgtgtctccttttcctatgctggactgagcggcgatgaccctgacctgggcccagctcacgtggtcactgtgattgcccggcagcggggtgaccagctagtcccattctccaccaagtctggggataccttactgctcctgcaccacggggacttctcagcagaggaggtgtttcatagagaactaaggagcaactccatgaagacctggggcctgcgggcagctggctggatggccatgttcatgggcctcaaccttatgacacggatcctctacaccttggtggactggtttcctgttttccgagacctggtcaacattggcctgaaagcctttgccttctgtgtggccacctcgctgaccctgctgaccgtggcggctggctggctcttctaccgacccctgtgggccctcctcattgccggcctggcccttgtgcccatccttgttgctcggacacgggtgccagccaaaaagttggagtgaaaagaccctggcacccgcccgacacctgcgtgagccctaggatccaggtcctctctcacctctgacccagctccatgccagagcaggagccccggtcaattttggactctgcacyccctctcctcttcaggggccagacttggcagcatgtgcaccaggttggtgttcaccagctcatgtcttccccacatctcttcttgccagtaagcagctttggtgggcagcagcagctcatgaatggcaagctgacagcttctcctgctgtttccttcctctcttggactgagtgggtacggccagccactcagcccattggcagctgacaacgcagacacgctctacggaggcctgctgataaagggctcagccttgccgtgtgctgcttctcatcactgcacacaagtgccatgctttgccaccaccaccaagcacatctgtgatcctgaagggcggccgttagtcattactgctgagtcctgggtcaccagcagacacactgggcatggacccctcaaagcaggcacacccaaaacacaagtctgtggctagaacctgatgtggtgtttaaaagagaagaaacactgaagatgtcctgaggagaaaagctggacatatactgggcttcacacttatcttatggcttggcagaatctttgtagtgtgtgggatctctgaaggccctatttaagtttttcttcgttactttgctgcttcatgtgtactttcctaccccaagaggaagttttctgaaataagatttaaaaacaaaacaaaaaaaacacttaatatttcagactgttacaggaaacaccctttagtctgtcagttgaattcagagcactgaaaggtgttaaattggggtatgtggtttgattgataaaaagttacctctcagtattttgtgtcactgagaagctttacaatggatgcttttgaaacaagtatcagcaaaaggatttgttttcactctgggaggagagggtggagaaagcacttgctttcatcctctggcatcggaaactcccctatgcacttgaagatggtttaaaagattaaagaaacgattaagagaaaaggttggaagctttatactaaatgggctccttcatggtgacgccccgtcaaccacaatcaagaactgaggcctgaggctggttgtacaatgcccacgcctgcctggctgctttcacctgggagtgctttcgatgtgggcacctgggcttcctagggctgcttctgagtggttctttcacgtgttgtgtccatagctttagtcttcctaaataagatccacccacacctaagtcacagaatttctaagttccccaactactctcacacccttttaaagataaagtatgttgtaaccaggatgtcttaaatgattctttgtgtaccttttctgtcatattcagaaaccgttttgtgcctgctgggagtaattcctttagcaattaagtatttggtagctgaataaggggtcagaacttctgaaaccagagatctgtaatcatctctattggcctggggtgcctgtgctataaatgagtttcttcacatgaaaaacacagccagcccaagatgacttatctgggtttaggattcaatagtattcactaactgcttattacatgagcaatttcatcaaatctccaaactcttaaaggatgctttcggaaaacacgctgtatacctagatgatgactaaatgcaaaatccttgggctttggtttttttctagtaaggattttaaataactgccgacttcaaaagtgttcttaaaacgaaagataatgttaagaaaaatttgaaagctttggaaaaccaaatttgtaatatcattgtattttttattaaaagttttgtaataaatttctaaattatnaaaaaaaaaaaaaaaaaaaaaaaaaaaa

SEQ ID NO: 226 - DNA, 2227 bp, Homo sapiens
  misc_feature (289)..(289): n equals a,t,g, or c
cggacgcgtgggtcgacccacgcgtccgggaaaaarggaaaaratgccgtgtaaaatctcgttctgtgtctgaattgccgtaggctcagatcttcatttgaggttctgtgtctgaattgccgtaggctcagatcttcatttgaggttatgttctataagttaacgttgatcttgtgtgagctttcggtagctggagtaacacaggcggcctcacagcgacctctccagcgccttccaaggcacatctgcagccagcgtaatcctcctgggagatgcctcctcaaggccntgctccagaccacgtggggarggcctgacarccaattcccaggctgtccccacccttgragagtgaccctaaacgctagacagatggggaatgggaaagaaaagaaagctgcagacctcaagttaaaattccctcaaaaacgtttttatttatctgctttttctgaaaggataaaggctttttgaaaattattttctaacaaataacatgaacacttctagaaaccctagaaaaacacaaagtattcaaaatagaaagaaaaattacccattactctttaagccagcattatccattgcggtgcttttggagttgggtgaggccgtagcctctgccaagtcaaggagcccggtggtggctgtggcattcctgcagggttgtttttttttctttgagatggagtctcactcttgtcaccccagctggaatgtggtggtgtaaacagctcactgcagccttgaccctgaggctcaagcgatccttctgccttggcctcctgagtagctgggatcccaggcgagagtcaccacaccctgtccatgttcctgcaggtcttgatatgcgaggacgctgtgtcttccctgccacattttcttcttctttcttgagacagacccttgctccatcacccaggccagagtgtggtsgtgcgaacacggctcactgcagcctcgaccctcaggctcaagcgatcctcacgcctcggacccccaaagtgctgggatcacaggcgagagtcaccatgctggcctgaatcttcagggtattttacggttgaagtgtcacttacttarccatscctgtttcaagagtgtaggtggtcaccctgtctctgycgctgacctggcctggaccctcggctgtgagagggaggggtgggctgggctggaggaacctraagccctcgtgatgtcacaagcccatctggctgggcatcccctgctgtgtcctgagctgcacatgccccaggtggcccccacagcagaggcgagccactgragggtgragggcttccacggacggtcttcaggggragaagaagggcccaggcccccaggagactcaggagaccagagcctggggtcaggggctyagcaggggctyarccagggctggatgtccggagccagccccgmagccctgkgktctttgttcttcgcactcccaccgtccgtgtgaacagctccagccccacctgcgcctccctgtgctgggctccatcagggagcccagaagacgtgtgtgcttctgaaattgggtccctacatgcctttgtcccagtgcaccttgctccttccatttactatcgagatttaaatgcctgttttctccccagaggttgacggatatattcagacgttacgacacggatcaggacggctggattcaggtgtcgtacgaacagtacctgtccatggtcttcagtatcgtatgaccctggcctctcgtgaagagcagcacaacatggaaagagccaaaatgtcacagttcctatctgtgagggaatggagcacaggtgcagttagatgctgttcttcctttagattttgtcacgtggggacccagctgtacatatgtggataagctgattaatggttttgcaactgtaatagtagctgtatcgttctaatgcagacattggatttggtgactgtctcattgtgccatgaggtaaatgtaatgtttcaggcattctgcttgcaaaaaaatctatcatgtgcttttctagatgtctctggytctatagtgcaaatgcttttattagccaataggaattttaaaataacatggaacttacacaaaaggcttttcatgtgccttacttttttaaaaaggagtttattgtattcattggaatatgtgacgtaagcaataaagggaatgttagacgtgtaaaaaaaaaaaaaaaaaaaaaaaaaaaaaaaaaaaaaaaaaaaa

SEQ ID NO: 227 - DNA, 2214 bp, Homo sapiens
  misc_feature (289)..(289): n equals a,t,g, or c
cggacgcgtgggtcgacccacgcgtccgggaaaaarggaaaaratgccgtgtaaaatctcgttctgtgtctgaattgccgtaggctcagatcttcatttgaggttctgtgtctgaattgccgtaggctcagatcttcatttgaggttatgttctataagttaacgttgatcttgtgtgagctttcggtagctggagtaacacaggcggcctcacagcgacctctccagcgccttccaaggcacatctgcagccagcgtamtcctcctgggagatgcctcctcaaggccntgctccagaccacgtgggrarggcctgacaagccaattcccaggctgtccccacccttgragagtgaccctaaacgctagacagatggggaatgggaaagaaaagaaagctgcagacctcaagttaaaattccctcaaaaacgtttttatttatctgctttttctgaaaggataaaggctttttgaaaattattttctaacaaataacatgaacacttctagaaaccctagaaaaacacaaagtattcaaaatagaaagaaaaattacccattactctttaagccagcattatccattgcggtgcttttggagttgggtgaggccgtagcctctgccaagtcaaggagcccggtggtggctgtggcattcctgcagggttgtttttttttctttgagatggagtctcactcttgtcaccccagctggaatgtggtggtgtaaacagctcactgcagccttgaccctgaggctcaagcgatccttctgccttggcctcctgagtagctgggatcccaggcgagagtcaccacaccctgtccatgttcctgcaggtcttgatatgcgaggacgctgtgtcttccctgccacattttcttcttctttcttgagacagacccttgctccatcacccaggccagagtgtggtsgtgcgaacacggctcactgcagcctcgaccctcaggctcaagcgatcctcacgcctcggacccccaaagtgctgggatcacaggcgagagtcaccatgctggcctgaatcttcagggtatttrcggttgargtgycacttacttarccatscctgtttcaagagtgtaggtggtcaccctgtctctgccgctgacctggcctggaccctcggctgtgagagggaggggtgggctgggctggaggaacctraagccctcgtgatgtcacaagcccatctggctgggcatcccctgctgtgtcctgagctgcacatgccccaggtggcccccacagcagaggcgagccactgragggtgragggcttccacggacggtcttcaggggragaagaagggcccaggcccccaggagactcaggagaccagagcctggggtcaggggctmagcaggggctyarccagggctggatgtccggagccagccccgmagccctgkgktctttgttcttcgcactcccaccgtccgtgtgaacagctccagccccacctgcgcctccctgtgctgggctccatcagggagcccagaagacgtgtgtgcttctgaaattgggtccctacatgcctttgtcccagtgcaccttgctccttccatttactatcgagatttaaatgcctgttttctccccagaggttgacggatatattcagacgttacgacacggatcaggacggctggattcaggtgtcgtacgaacagtacctgtccatggtcttcagtatcgtatgaccctggcctctcgtgaagagcagcacaacatggaaagagccaaaatgtcacagttcctatctgtgagggaatggagcacaggtgcagttagatgctgttcttcctttagattttgtcacgtggggacccagctgtacatatgtggataagctgattaatggttttgcaactgtaatagtagctgtatcgttctaatgcagacattggatttggtgactgtctcattgtgccatgaggtaaatgtaatgtttcaggcattctgcttgcaaaaaaatctatcatgtgcttttctagatgtctctggttctatagtgcaaatgcttttattagccaataggaattttaaaataacatggaacttacacaaaaggcttttcatgtgccttacttttttaaaaaggagtttattgtattcattggaatatgtgacgtaagcaataaagggaatgttagacgtgtaaaaaaaaaaaaaaaaaaaaaaaaaaaaaag

SEQ ID NO: 228 - DNA, 1145 bp, Homo sapiens
ttttttttttttttttttttttgactgaactaagtggcttttttattagagaaagccagaattacaaaagacttcccttttcttggggtatggctgtctcagcacaatactcaacataactgcagaactgatgtggctcaggcaccctggttttaattccttgaggatctggcaattggcttacgcaaaaggtcaccatttgaggtcctgccttactaattatgtgctgcccaacaactaaatttgtaatttgtttttctctagtttgagcagggtctgaattttttcatttatttccttttttgccagcagacagacttgagtctgtaaagacaagcaaatacactgacagaagtttaccatagtttctaaaatgtaaaaaagaaaacccccaaaagactcaagaaaattagaccacaaattttgcattgttcattgtagcactattggtaataaaataacaaatgtttgtgcatttttatgtgaagatccttctcgtatttcatttggaaagatgagcaagaggtctgcttccttcattttacttccccttctgtttttgaaaggcagtttcgccaagcttaatgcaagaatatctgactgtttagaagaaagatattgccacaatctctggatggttttccagggttgtgttattactgagcttcatctttccagaatgagcaaaacactgtccagtctttgttacgattttgtaataaatgtgtacattttttttaaatttttggacatcacatgaataaaggtatgtatgtacgaatgtgtatatattatatatatgacatctattttggaaaatgtttgccctgctgtacctcatttttaggaggtgtgcatggatgcaatatatgaaaatgggacattctggaactgctggtcaggggactttgtcgccctgtgcactaaaagggccagattttcagcagccaaggacatccatacccaagtgaatgtgatgggacttaaaagaagtgaactgagacaattcactctggctgtttgaacagcagcgtttcataggaagagaaaaaaagatcaatcttgtattttctgaccacataaaggcttcttctctttgtaataaagtagaaaagctctcctcaaaaaaaaaaaaaaaaaaaaaa

SEQ ID NO: 229 - DNA, 802 bp, Homo sapiens
  misc_feature (337)..(337): n equals a,t,g, or c
  misc_feature (359)..(359): n equals a,t,g, or c
ggtgggtgaccagagagtcctgtctatcctaggaggagaacattcagcccaaatcccagccccatcatgcacagatcagagccatttctgaaaatgtcgctgctgattctgcttttcctgggattggcagaagcctgtactcctcgtgaagtcaacttgctgaaagggatcataggtctcatgagcagactgtcaccggatgagatcctaggcttgctgagcctccaagtactgcatgaagaaacaagtggctgcaaggaggaagttaaacccttctcaggcaccaccccatccaggaaaccactccccaagagggaagaacacgtggaayttcctngaaatgcgsctacatggtgrtngacctacctcttcgtatcctacaacaaaggggactggttcactttttcctcccaagtgttactgccaytactgtaacttggaactggacatcagggatgatccctgctgttctttctagtgagcctgctccatctcagcttagccttcacaaggcctccatctcccaggcattctaacctctgaagaaagctctctgtcccctggactgcctgtgtggagggtaatgaactgggtcctttaaggaatggcacctgggtgcccagaggcatggccagaaggtgtctgtgggggccatgccttagggggatgcacccagggcggctgagagagcaactgcaggagtttcccctaaaatctctcctccagatcgttctcgaactttccccactacttccataataaaatgtatacttgttgaaaaaaaaaaaaaaaaaaactcgag

SEQ ID NO: 230 - DNA, 711 bp, Homo sapiens
  misc_feature (345)..(345): n equals a,t,g, or c
ggcacgagcgaagaccctgttcggaccctgccccgattccagactcaggtagatcgtcggcataccctctaccgtggacaccaggcagccctggggctgatggagagagatcaggtatcccccagggagtaggggctaccttgaggggatgatagacctcccccactcccagtgkkactctggaaatatgaaggaactagggagtggaagagatttcagagctggggagaggagttcctcccttcaaagccagcaactgcctttggggaatgtcggggggtctctcctttctcctgcttgtttraggtggtacacagtccccccttcamctggsgggaagctgtnccggacaractcatctcagctttcccttggggcaggatcgggggcagcagctccagcagaaacagcaggatctggagcaggaaggcctcgaggccacacaggggctgctggccggcgagtgggccccacccctctggragctgggcagcctcttccaggccttcgtgaagagggagagccaggcttatgcgtaagcttcatagcttctgctggcctggggtggacccaggacccctggggcctgggtgccctgagtggtggtaaagtggagcaatcccttcacgctccttggccatgttctgagcggccagcttggcctttgccttaataaatgtgctttattttcaaaaaaaaaaaaaaaaaact

SEQ ID NO: 231 - DNA, 1614 bp, Homo sapiens
ggtgattggtagttactatgtggggacacaattacttgggctgaaataatccacctgttgtggttggggtcctctggggcattccagggtgagaggttgtcactgccacctgggccatgtgggccggcaccagcattttgtggttacgaattctacagtcacaaatatctttgggcaaatccccttctatacctcaaggcagcttttggtttgcaaccccactggccagagggaagggccagtcacttggctctctcactgccctgcgccccagatggttctagggctgctgttttcccttggccctgccaacaccactgtttttacttctgctcattggctgagtgcagtggttcctggaagccagtggcacgtttccccgcgtagctcgcttatcccacagcacacacccaagggttctgttgctaacacgctgaattaattctttgctcatcttacagagtgtgttttgactgcccccatttctgaggccttgtaaggccagagctttgttgcttcatcggcaggttgggacttagatggccgtgaatgtttcctctctgctgctgcagtaagtaagtgcccgcaccatagtgtgtttggaggctgaagttgaagcgaggctgtgaggggagatggacgtgtgaggagggatgatggggcttgagcaaagtgggggaggggcaaagcagttggcccaacacattccccacccctttgagaggtctgaggcctgcagacctggctcggagcccacctggtagtcctcagactgtgtgtgtgtgtgtgtgtgtgtgtgtgtgtgtgtgtgtgtgtgtgtgtaaaagagagaagttgtggagaaatggggggctgattctgctcagattcatcaggatgagtagaaggcacccagctctcaccctggcctgacatgtgtgtccctgagcaggttacagtcctctctgagcctctgcttcccatctggaccctgctgggcagggcttctgagctccttagcactagcaggaggggctccaggggccctccctccatggcagccaggacaggactctaaaatgaggacagcagagctcgtggggggctcccacggacccgccgtgggcccaggggaggcagagcctgagccaacagcagtggtgctgtggaccgtggatcctgagggtggcctggggcaagtaccggctgagggtccaggtgggctttgtgtacctttgggtcctggggccctggtgacttggactccaggttagagtcaagtgacaggagaaaggctggtggggccctgtgcttccgacttcatttcgagtgatggcagttcccaggaaggaatccacagctgacggtggctgacagatcagagaatggaaggcgaggcaggcgggcgtctgcgtgacctcaggtgcttggggcccagcagacccagagaaccatttccactaggccagggtgccggaagtgtccacaggtcttagattccctgttcagatgaaaagatttgtgcctttaatgataaaagtgatctgcatagagtcaaaaattcaagccatgggtataaaatgcaagtaaaatccctgccctcacctatcccaccctactacacagagatgtcct

SEQ ID NO: 232 - DNA, 1087 bp, Homo sapiens
  misc_feature (14)..(14): n equals a,t,g, or c
  misc_feature (55)..(55): n equals a,t,g, or c
  misc_feature (63)..(64): n equals a,t,g, or c
  misc_feature (174)..(174): n equals a,t,g, or c
caagttaaagtaangtggccccggcaaccaataagtgttgtttttggaagggctngaaagttnnaaagcgagggcttgtaaaggggaagatgggaccgttgtgaaggaaggatgattggggctttgaagcaaaagtgggggaagggggcaaaggcagttggcccaacacattcnccacccctttgagaggtctgaggcctgcagacctggctcggagcccacctggtagtcctcagactgtgtgtgtgtgtgtgtgtgtgtgtgtgtgtgtgtgtgtgtgtgtgtgtaaaagagagaagttgtggagaaatggggggctgattctgctcagattcatcaggatgagtagaaggcacccagctctcaccctggcctgacatgtgtgtccctgagcaggttacagkcctctctgagcctctgcttcccatctggaccctgctgggcagggcttctragctccttagcactagcaggaggggctccaggggccctccctccatggcagccaggacaggactctaaaatgaggacagcagagctcgtggggggctcccacggacccgccktgggcccaggggaggcagagcctgagccaacagcagtggtgctgtggaccgtggatcctgagggtggcctggggcaagtaccggctgagggtccaggtgggctttgtgtacctttgggtcctggggccctggtgacttggactccaggttagagtcaagtgacaggagaaaggctggtggggccctgtgcttccgacttcatttcgagtgatggcagttcccaggaaggaatccacagctgacggtggctgacagatcagagaatggaaggcgaggcaggcgggcgtctgcgtgacctcaggtgcttggggcccagcagacccagagaaccatttccactaggccagggtgccggaagtgtccacaggtcttagattccctgttcagatgaaaagatttgtgcctttaatgataaaagtgatctgcatagagtcaaaaattcaagccatgggtataaaatgtcaagtaaaatccctgccctcacctatcccaccctactacacagagatgtcctctcgagg

SEQ ID NO: 233 - DNA, 1191 bp, Homo sapiens
gctgggctggaacacaagarcccacagggctgccgtccacactctcccggtcagagtcctgggaccacatggggacgctgccatggcttcttgccttcttcattctgggtctccaggcttgggatactcccaccatcgtctcccgcaaggagtggggggcaagaccgctcgcctgcagggccctgctgaccctgcctgtggcctacatcatcacagaccagctcccagggatgcagtgccagcagcagagcgtttgcagccagatgctgcgggggttgcagtcccattccgtctacaccataggctggtgcgacgtggcgtacaacttcctggttggggatgatggcagggtgtatgaaggtgttggctggaacatccaaggcttgcacacccagggctacaacaacatttccctgggcatcgccttctttggcaataagataagcagcagtcccagccctgctgccttatcagctgcagagggtctgatctcctatgccatccagaagggtcacctgtcgcccaggtatattcagccacttcttctgaaagaagagacctgcctggaccctcaacatccagtgatgcccagraaggtttgccccaacatcatcaaacgatctgcttgggaagccagagagacacactgccctaaaatgaacctcccagccaaatatgtcatcatcatccacaccgctggcacaagctgcactgtatccacagactgccagactgtcgtccgaaacatacagtcctttcacatggacacacggaacttttgtgacattggatatcaataaggccaggcgtggcggcgattacgtctgtaatcccaggactttgggaggccaaggcgggcagatcacttcaggccaggaattcaagagcagcctggccaatatggcgaaactctgtctctactgaaaacaaacaaacaaacaaacaaacaaacaaagaaacaacaaaaattagccgggtgtggtggcacacgcctgtagtcccagctactcaggaggctgaggcataagaattgcttgaaccctggaggcggaggttgcagtgagctgagattgggccaccgcactccagtctgggagacagagtgagactgtctcaaaacaacaacaaaaaaatccctaacataatctcaaaaaaaaaaaaaaaaaaaaaaaaaaaaaaaagggcggccgc

SEQ ID NO: 234 - DNA, 1626 bp, Homo sapiens
  misc_feature (525)..(525): n equals a,t,g, or c
  misc_feature (542)..(542): n equals a,t,g, or c
  misc_feature (562)..(562): n equals a,t,g, or c
  misc_feature (607)..(607): n equals a,t,g, or c
ccacgcgtccgacgcggcgcacgcggcagtcctgatggcccggcatgggttaccgctgctgcccctgctgtcgctcctggtcggcgcgtggctcaagctaggaaatggacaggctactagcatggtccaactgcagggtgggagattcctgatgggaacaaattctccagacagcagagatggtgaagggcctgtgcgggaggcgacagtgaaaccctttgccatcgacatatttcctgtcaccaacaaagatttcagggattttgtcagggagaaaaagtatcggacagaagctgagatgtttggatggagctttgtctttgaggactttgtctctgatgagctgagaaacaaagccacccagccaatgaagtctgtactctggtggcttccagtggaaaaggcattttggaggcagcctgcaggtcctggctctggcatccgagagagactggagcacccagtgttacacgtgagctggratgacgcccgtgcctaatgtgcytkgsgggggraaacgactgncccacsggagggaagantggggagtttttccgcccgnaggggggcttgaarggtccaagtttaccccatggggggaactggnttccagccaaaccgcaccaacctgtggcagggaaagttccccaagggagacaaagctgaggatggcttccatggagtctccccagtgaatgctttccccgcccagaacaactacgggctctatgacctcctggggaacgtgtgggagtggacagcatcaccgtaccaggctgctgagcaggacatgcgcgtcctccggggggcatcctggatcgacacagctgatggctctgccaatcaccgggcccgggtcaccaccaggatgggcaacactccagattcagcctcagacaacctcggtttccgctgtgctgcagacgcaggccggccgccaggggagctgtaagcagccgggtggtgacaaggagaaaagccttctagggtcactgtcattccctggccatgttgcaaacagcgcaattccaagctcgagagcttcagcctcaggaaagaacttccccttccctgtctcccatccctctgtggcaggcgcctctcaccagggcaggagaggactcagcctcctgtgttttggagaaggggcccaatgtgtgttgacgatggctgggggccaggtgtttctgttagaggccaagtattattgacacaggattgcaaacacacaaacaattggaacagagcactctgaaaggccattttttaagcattttaaaatctattctctccccctttctccctggatgattcaggaagctgmacattgtttcctcaaggcagaattttcctggttctgttttctcagccagttgctgtggaaggagaatgctttctttgtggcctcatctgtggtttcgtgtccctctgaaggaaactagtttccactgtgtaacaggcagacatgtaactatttaaagcacagttcagtcctaaaagggtctgggagaaccagatgatgtactaggtgaagcattgcattgtgggaatcacaaagcaaatagtactccagaaagaccctgtctcaaaaaaaaaaaaaaaaaaaaaaaaaaaaaaaaaaaaaaa

SEQ ID NO: 235 - DNA, 2351 bp, Homo sapiens
ccacgcgtccggcagaagcagcagcagcagaagacacagcgccggtccaggaggcggctcgagctgttcgtaaagtcgcccgacagctttttctccgtagtatgcgagttgacaaaacagccagagaacagggctccccattacaatcttttcgagatcttttcccttgctaaccggatctgatttgtgcgaaaacatgccttgcacttgtacctggaggaactggagacagtggattcgacctttagtagcggtcatctacctggtgtcaatagtggttgcggttcccctatgcgtgtgggaattacagaaactggaggttggaatacacaccaaggcttggtttattgctggaatctttttgctgtgactattcctatatcactgtgggtgatattgcaacacttagtgcattatacacaacctgaactacaaaaaccaataataaggattctttgggatggtacctatttacagttttagatagttggatagctttgaaatatcccggaattgcaatatatgtggatacctgcagagaatgctatgaagcttatgtaatttacaactttatgggattccttaccaattatctaactaaccggtatccaaatctggtattaatccttgaagccaaagatcaacagaaacatttccctcctttatgttgctgtccaccatgggctatgggagaagtattgctgtttaggtgcaaactaagtgtattacagtacacagttgtcagacctttcaccaccatcgttgctttaatctgtgagctgcttggtatatatgacgaagggaactttagcttttcaaatgcttggacttatttggttataataaacaacatgtcacagttgtttgccatgtattgtctcctgctcttttataaagtactaaaagaagaactgagcccaatccaacctgttggcaaatttctttgtgtaaagctggtggtttttgtttctttttgatttggcgtttaccttttcctaacatataggcaagcagtagttattgctttgttggtaaaagttggcgttatttctgaaaagcatacgtgggaatggcaaactgtagaagctgtggccaccggactccaggattttattatctgtattgagatgttcctcgctgccattgctcatcattacacattctcatataaaccatatgtccaagaagcagaagagggctcatgctttgattcctttcttgccatgtgggatgtctcagatattagagatgatatttctgaacaagtaaggcatgttggacggacagtcaggggacatcccaggaaaaaattgtttcccgaggatcaagatcaaaatgaacatacaagtttattatcatcatcatcacaagatgcaatttccattgcttcttctatgccaccttcacccatgggtcactaccaagggtttggacacactgtgactccccagactacacctaccacagctaagatatctgatgaaatccttagtgatactataggagagaaaaaagaaccttcagataaatccgtggattcctgaacagtatggaaaagcaaactgtgcaactactacattatatcattacctggtatcccatggattttgtgcttgggacagaccataaatgatggaaaatgtcaacacaaaaatagctgaaagccaggtacaactactgcatttatatatgtaagttttgtatatcaaaaataattggtctaaatttcctagacttagacttgatttcttaacattagggtatcgcatactcaaatggtagacaatgaccccaactaaatcttcctgatgttacactgctttatcaagaggatggacttttttttttttgagacagacagagtcttgctctgtcacccaggctggagtgcagtggcgcaatctcgggtcactgcaagctctgcctcccaagttcatgccattctcctgcctcagccctcccaagtagctgggactacaggcacctgccaccatgcccagctaattttttttttttcagtagagacagggtctcaccatgttagccaggatggtcttgatctgacctcgtgatccgccgacctcggcctcccaaagtgctggaattacaggcgtgagccactgcgcctggccaagaatggacattttttaaaaaaacatcagtacttcctaccactgctgcatgagtataatgctccggaattatcagaaagcataatgcagaaatacgaattagtggaacttaatcatgtgccatataagcttacctaacaaacagttatatccctattcctcaactgaatgtctttcaataaataagaatttatcatttaaaaaaaaaaaaaaaaaaaa

SEQ ID NO: 236 - DNA, 1001 bp, Homo sapiens
cgcgctggaaccctgtggcggcggccatggccatatggcgctgcccgcctggctgcagccaggtataggaagaatgcgtatcttttcatctattacttaatccagttctgtggccactcttggatatttacaaatatgacagtcagattcttttcatttggaaaaggtaaaactccgaaacagtttttttatttttaacttttaatccttgttttcacctcatcctgcttatattaaatttctacacacctcaaccttctaccacgggatacagattcaatggttgacactttttatgctattggacttgtgatgcgactttgccaatccgtatctctcctggaactgctgcacatatatgttggcattgagtcaaaccatcttctcccaaggtttttgcagctcacagaaagaataatcatcctttttgtggtgatcaccagtcaagaggaagtccaagagaaatatgtggtgtgtgttttattcgtcttttggaatctattggatatggttaggtacacttatagcatgttatcagtcataggaatatcctatgctgtcttgacatggctcagtcaaacactatggatgccaatttatcctttgtgtgttcttgctgaagcatttgccatctatcaatcgctgccttattttgaatcatttggcacttattccaccaagctgccctttgacttatccatctatttcccatatgtgctgaaaatatatctcatgatgctctttataggtatgtattttacctacagtcatctatactcakaaagaagagacatcctcggaatctttcccattaaaaaaaagaagatgtgaagtacagcattccagtgtgacacgagaaaagacaggctgtggattcagtgcagtaaataaaacacaggaagtattctggtggaaaaaaaaaaaaaaaaaaaaaaaaaaraaraaaaaaaaawaaaaaaaaaaaaaaaaaaaaaaaaaaaaaaaaaaaaaaaaaaaaaaaa

SEQ ID NO: 237 - DNA, 669 bp, Homo sapiens
ccacgcgtccggacactttttatgctattggacttgtgatgcgactttgccaatccgtatctctcctggaactgctgcacatatatgttggcattgagtcaaaccatcttctcccaaggtttttgcagctcacagaaagaataatcatcctttttgtggtgatcaccagtcaagaggaagtccaagagaaatatgtggtgtgtgttttattcgccttttggaatctattggatatggttaggtacacttatagcatgttatcagtcataggaatatcctatgctgtcttgacatgggctcagtcaaacactatggatgccaatttatcctttgtgtgttcttgctgaagcatttgccatctatcaatcgctggcttattttgaatcatttggcacttattccaccaagctgccctttgacttatccatctatttcccatatgtgctgaaaatatatctcatgatgctctttataggtatgtattttacctacagtcatctatactcagaaagaagagacatcctcggaatctttcccattaaaaaaaagaagatgtgaagtacagcattccagtgtgacacgagaaaagacaggctgtggattcagtgcagtaaataaaacacaggaagtattctggtggaaaaaaaaaaaaaaaaaaaaaaaaaaaaa

SEQ ID NO: 238 - DNA, 417 bp, Homo sapiens
ccacgcgtccgctcctctagaggctccacatgaagtcccagtgctacagtcctagttattttgccttcttctgcctggttttctttcagatcacctcagccagttctcagacacttaggggacatgttctctgcaggaccactctgagggactcttctgcatattgctgacctgagaggatggcctcagagctgacttgggcaatcctccccaacaggaaggggagacattgcctgccactgaggaaacaggtcatgaaggtggagataagctgcaaggggcgaagcaactttatgtcagtggaaaacgtgtctctttaaagctgctatgtgaacagcttttacagtcattaaatttacctaaactaaggttaaaaaaaaaaaaaaaaaaaaaaaaaaaaaaaaaaaaaaaaaaaaa

SEQ ID NO: 239 - DNA, 1949 bp, Homo sapiens
  misc_feature (1130)..(1130): n equals a,t,g, or c
  misc_feature (1948)..(1948): n equals a,t,g, or c
gctacgccgtgggcacttcctcaacgacctgtgcgcgtccatgtggttcacctacctgctgctctacctgcactcggtgcgcgcctacagctcccgcggcgcgggctgctgctgctgctgggccaggtggcgacgggctgtgcacaccgctcgtgggctacgaggccgaccgcgccgccagctgctgcgcccgctacggcccgcgcaaggcctggcacctggtcggcaccgtctgcgtcctgctgtccttccccttcatcttcagcccctgcctgggctgtggggcggccacgccgagtgggctgccctcctctactacggcccgttcatcgtgatcttccagtttggctgggcctccacacagatctcccacctcagcctcatcccggagctcgtcaccaacgaccatgagaaggtggagctcacggcactcaggtatgcgttcaccgtggtggccaacatcaccgtctacggcgccgcctggctcctgctgcacctgcagggctcgtcgcgggtggagcccacccaagacatcagcatcagcgaccagctggggggccaggacgtgcccgtgttccggaacctgtccctgctggtggtgggtgtcggcgccgtgttctcactgctattccacctgggcacccgggagaggcgccggccgcatgcggaggagccaggcgagcacacccccctgttggcccctgccacggcccagcccctgctgctctggaagcactggctccgggagccggctttctaccaggtgggcatactgtacatgaccaccaggctcatcgtgaacctgtcccagacctacatggccatgtacctcacctactcgctccacctgcccaagaagttcatcgcgaccattcccctggtgatgtacctcagcggcttcttgtcctccttcctcatgaagcccatcaacaagtgcattgggaggaacatgacctacttctcaggcctcctggtgatcctggcctttgccgcctgggtggcgctggcggagggactgggtgtggccgtgtaygcagcggctgtgctgctgggtgctggctgtgccaccatcctcgtcacctcgctggccatgacggccgacctcatcggtccccacacgaacagcgganckttcgtgtacggctccatgagcttcttggataaggtggccaatgggctggcagtcatggccatccagagcctgcacccttgcccctcagagctctgctgcagggcctgcgtgagcttttaccactgggcgatggtggctgtgacgggcggcgtgggcgtggccgctgccctgtgtctctgtagcctcctgctgtggccgacccgcctgcgacgctgggaccgtgatgcccggccctgactcctgacagcctcctgcacctgtgcaagggaactgtggggacgcacgaggatgccccccagggccttggggaaaagcccccactgcccctcactcttctctggacccccaccctccatcctcacccagctcccgggggtggggtcgggtgagggcagcagggatgcccgccagggacttgcaaggaccccctgggttttgagggtgtcccattctcaactctaatccatcccagccctctggaggatttggggtgcccctctcggcagggaacaggaagtaggaatcccagaagggtctgggggaaccctaaccctgagctcagtccagttcacccctcacctccagcctgggggtctccagacactgccagggccccctcaggacggctggagcctggaggagacagccacggggtggtgggctgggcctggaccccaccgtggtgggcagcagggctgcccggcaggcttggtggactctgctggcagcaaataaagagatgacggcaaaaaaaaaaaaaaaaaaaaaaaaaaaaaaaaaaaaaaaaaaaaaaaaaaaaggggggggggctagttnt

SEQ ID NO: 240 - DNA, 1487 bp, Homo sapiens
  misc_feature (78)..(78): n equals a,t,g, or c
  misc_feature (948)..(948): n equals a,t,g, or c
ccgctgctgataactatggcatcccccgggcctgcaggaattcggcacggagctacggcgccgcctggctcctgctgncacctgcaggctcgtcgcgggtggagcccacccaagacatcagcatcagcgaccagctggggggccaggacgtgcccgtgttccggaacctgtccctgctggtggtgggtgtcggcgccgtgttctcactgctattccacctgggcacccgggagaggcgccggccgcatgcggasgagccaggcgagcacacccccctgttggcccctgccacggcccagcccctgctgctctggaagcactggctccgggagcsggctttctaccaggtgggcatactgtacatgaccaccaggctcatcgtgaacctgtcccagacctacatggccatgtacctcacctactcgctccacctgcccaagaagttcatcgcgaccattcccctggtgatgtacctcagcggcttcttgtcctccttcctcatgaagcccatcaacaagtgcattgggaggaacatgacctacttctcaggcctcctggtgatcctggcctttgccgcctgggtggcgctggcggagggactgggtgtggccgtgtacgcagcggctgtgctgctgggtgctggctgtgccaccatcctcgtcacctcgctggccatgacggccgacctcatcggtccccacacgaacagcggagckttcgtgtacggctccatgagcttcttggataaggtggccaatgggctggcagtcatggccatccagagcctgcacccttgcccctcagagctctgctgcagggcctgcgtgagcttttaccactgggcgatggtggctgtgacgggcggcgtgggcgtggccgctgccctgtgtctctgtagcctcctgctgtggccgacccgcctgcgacgctgatgagacctgcacgcantggctcacagcagcacgatttgtgacagcccgaggcggagaacaccgaacacccagtgaaggtgaggggatcagcacggcgcggccacccacgcacccacgcgctggaatgagactcagccacaaggaggtgcgaagctctgacccaggccacagtgcggatgcaccttgaggatgtcacgctcagtgagagacaccagacacagaagggtacgctgtgatcccacttctatgaaatgtccaggacagaccaatccacagaatcagggagaggattcgtgggtgccgggactggggagggggacctgggggtgactaggtgacataatggggacagggctgccttctgggtgatgagaatgttctggaatcagatgggatggctgcacggcgtggtgaaggtactgaacgccacctcactgtaagacggtagattttgtattttaccacaataaacaaaacaaaacaaaaccaaaaaaaaaaaaaaaaaaaaaaaaaaaaggaattcgatatcaagcttatcgataccgtcgacctcga

SEQ ID NO: 241 - DNA, 1525 bp, Homo sapiens
  misc_feature (78)..(78): n equals a,t,g, or c
ccgctgctgataactatggcatcccccgggcctgcaggaattcggcacggagctacggcgccgcctggctcctgctgncacctgcaggctcgtcgcgggtggagcccacccaagacatcagcatcagcgaccagctggggggccaggacgtgcccgtgttccggaacctgtccctgctggtggtgggtgtcggcgccgtgttctcactgctattccacctgggcacccgggagaggcgccggccgcatgcggasgagccaggcgagcacacccccctgttggcccctgccacggcccagcccctgctgctctggaagcactggctccgggagcsggctttctaccaggtgggcatactgtacatgaccaccaggctcatcgtgaacctgtcccagacctacatggccatgtacctcacctactcgctccacctgcccaagaagttcatcgcgaccattcccctggtgatgtacctcagcggcttcttgtcctccttcctcatgaagcccatcaacaagtgcattgggaggaacatgacctacttctcaggcctcctggtgatcctggcctttgccgcctgggtggcgctggcggagggactgggtgtggccgtgtacgcagcggctgtgctgctgggtgctggctgtgccaccatcctcgtcacctcgctggccatgacggccgacctcatcggtccccacacgaacagcggactktcgtgtacggctccatgagcttcttggataaggtggccaatgggctggcagtcatggccatccagagcctgcacccttgcccctcagagctctgctgcagggcctgcgtgagcttttaccactgggcgatggtggctgtgacgggcggcgtgggcgtggccgctgccctgtgtctctgtagcctcctgctgtggccgacccgcctgcgacgctgggaccgtgatgcccggccctgactcctgacagcctcctgcacctgtgcaagggaactgtggggacgcacgaggatgccccccarggccttggggaaaagcccccactgcccctcactcttctctggacccccaccctccatcctcacccagctcccgggggtggggtcgggtgagggcagcagggatgcccgccagggacttgcaaggaccccctgggttttgagggtgtcccattctcaactctaatccatcccagccctctggaggatttggggtgcccctctcggcagggaacaggaagtaggaatcccagaagggtctgggggaaccctaaccctgagctcagtccagttcacccctcacctccagcctgggggtctccagacactgccagggccccctcaggacggctggagcctggaggagacagccacggggtggtgggctgggcctggaccccaccgtggtgggcagcagggctgcccggcaggcttggtggactctgctggcagcaaataaagagatgacggcaaaaaaaaaaaaaaaaaaaaaaaaaaaaaaaaaaaaaaaaaaaaaaaaaaacccaccgtccgc

SEQ ID NO: 242 - DNA, 1050 bp, Homo sapiens
ccacgcgtccggccagccagtccgcccgtccggagcccggctcgctggggcagcatggcggggtcgccgctgctctgggggccgcgggccgggggcgtcggccttttggtgctgctgctgctcggcctgtttcggccgccccccgcgctctgcgcgcggccggtaaaggagccccgcggcctaagcgcagcgtctccgcccttggctagactggcgctcctcgccgcttccggcggtcagtgccccgaggtgaggcggcgggggcggtgcagacctggcgcgggcgctggcgcatctgctggagccgaacgtcaggagcgggcgcgggccgaggcgcagaggctgaggatcagcaggcgcgcgtcctggcgcagctgctgcgcgtctggggcgccccccgcaactctgatccggctctgggcctggacgacgaccccgacgcgcctgcagcgcagctcgctcgcgctctgctccgcgcccgccttgaccctgccgccctagcagcccagcttgtccccgcgcccgtccccgccgcggcgctccgaccccggcccccggtctacgacgacggccccgcgggcccggatgctgaggaggcaggcgacgagacacccgacgtggaccccgagctgttgaggtacttgctgggacggattcttgcgggaagcgcggactccgagggggtggcagccccgcgccgcctccgccgtgccgccgaccacgatgtgggctctgagctgccccctgagggcgtgctgggggcgctgctgcgtgtgaaacgcctagagaccccggcgccccaggtgcctgcacgccgcctcttgccaccctgagcactgcccggatcccgtgcaccctgggacccagaagtgcccccgccatcccgccaccaggactgctccccgccagcacgtccagagcaacttaccccggccagccagccctctcacccgaggatccctaccccctggccccacaataaacatgatctgaagcagcaaaaaaaaaaaaaaaaaaaaaaaaaaaaaaaaaaaaaaaaaaaaaaaaaaa

SEQ ID NO: 243 - DNA, 647 bp, Homo sapiens
  misc_feature (525)..(525): n equals a,t,g, or c
  misc_feature (578)..(578): n equals a,t,g, or c
  misc_feature (581)..(581): n equals a,t,g, or c
  misc_feature (620)..(620): n equals a,t,g, or c
  misc_feature (629)..(630): n equals a,t,g, or c
gtgaaacgcctgggctcaagctgattcacctgcctccacctcccacagtgctgggattacaaacatgatcccccacgcccagccaacacaaaacttctgatgctctgttttctcatctgtgaactggagctaaggctaagtggtctgtctgtttaataagagtttgaatcagatggcctggcatgaagagtcactggcctgagagaatgtcaggggcatttgtaaatgtgtaaagggctgaaaaatcctgagggattattattattgctattgttgttattattcacagacacatycaacagccattgtctgcctccttatctgtcatgctttctgcacgagcgtcagcctgagcttcaatctgtgtgtatatctgcagcttacgtccttgcacccctccagaacccagtttcatccttgtaggtttttccraagcaggatttgcacaagtggcgtgttttcttaagtatttattttgcaggccatttactcggcatggctatttttacagtgggtaaggagcanggctaaaaataacttagctcataaccagacaggttctgcatttgacattacgnggnattcatttgcatcccatttggtcgcctttctggttaacnggtagaatnnaagaaagctcacccgaa

SEQ ID NO: 244 - DNA, 1321 bp, Homo sapiens
gcgggggggaggaggagggggaggagggagcggagatctcggggctcggagccggccgccgctccgctccgatcgctgtggggcttggttttttgggggtgggggggcgggggggctcagatatggaggcaaatgggagccaaggcacctcgggcagcgccaacgactcccagcacgaccccggtaaaatgtttatcggtggactgagctggcagacctcaccagatagccttagagactattttagcaaatttggagaaattagagaatgtatggtcatgagagatcccactacgaaacgctccagaggcttcggtttcgtcacgttcgcagacccagcaagtgtagataaagtattaggtcagccccaccatgagttagattccaagacgattgaccccaaagttgcatttcctcgtcgagcgcaacccaagatggtcacaagaacaaagaaaatatttgtaggcgggttatctgcgaacacagtagtggaagatgtaaagcaatatttcgagyagtttkgcaaggtggaagatgcaatgctgatgtttgataaaactaccaacaggcacagagggtttggctttgtcacttttgagaatgaagatgttgtggagaaagtctgtgagattcatttccatgaaatcaataataaaatggtagaatgtaagaaagctcagccgaaagaagtcatgttcccacctgggacaagaggccgggcccggggactgccttacaccatggacgcgttcatgcttggcatggggatgctgggtgagtctggacaggaccgcaggtcaccatggactgggagggctatggaggcctctactcccaactgggtcacctaccagtggggcaaactgcttcacctttctaagcctcagtttccttgtctgtagatgaggatgataattccccgttccaagacagttgtgatgattaagtgtgggtgtgtgtgtgtgcatgcatgtgtgtgtgtgtgtgtgtgtgtttgtatttataatattgccccatgcctggcttataggatatgttagactattttctctcttttccatctccttcctcaaaagaaggaaaagtccccctctatctgcctcagccctctcatctgagtgggagttyttaagatgtaaggactcctggctgacttgacttgtgtgggctaaggctacgttttctaaaacttgggagaggagggaagtggtaagggtgggcgataatcctgtctatttaaatgattaacatttttctcttgggatatcaaaatttgcatttaaatggatgttttaaatagcctgttttactctttatttgc

SEQ ID NO: 245 - DNA, 1084 bp, Homo sapiens
ggatggcgctacgtctgctgcggagggcggcgcgcggagctgcggcggcggcgctgctgaggctgaaagcgtctctagcagctgatatccccagacttggatatagttcctcatcccatcacaagtacatcccccggagggcagtgctttatgtacctggaaatgatgaaaagaaaataaagaagattccatccctgaatgtagattgtgcagtgctcgactgtgaggatggagtggctgcaaacaaaaagaatgaagctcgactgagaattgtaaaaactcttgaagacattgatctgggccctactgaaaaatgtgtgagagtcaactcagtttccagtggtctggcggaagaagacctagagacccttttgcaatcccgggtccttccttccagcctgatgctaccaaaggtggaaagtcctgaagaaatccagtgggcagtgtgtgaagaaaccctgaaggtcgggcctcaagtaggtctctttctagatgcagtccgtttttggaggaraagactttcgagccacataggtgcamcaagtartaaagaaaccctggatawtctctacgcccggcaaaagattgttgtcatagcgaaagcctttggtctccaagccgtaratctggkgkacattgactttcgagatggarctkggctgcttagacagtcacgagaaggagccgccatgggcttcactggtaagcaggtgattcaccctaaccaaattgccgtggtccaggagcagttttctccttcccctgaaaaaattaagtgggctgaagaactgattgctgcctttaaagaacatcaacaattaggaaagggggcctttactttccaagggagtatgatcgacatgccattactgaagcaggcccagaacactgttacgcttgccacctccatcaaggaaaaatgatctgttaaatgaagctgtcatcaggctaaagggtattgaagctgcagagggatcaacttgtgcttgccagaggacgccaatgaagtttgaaacaccaacaatcagagattttgtttctgttcctcattaaatcatgagcttttgtgccgagaaaaaaaaaa

SEQ ID NO: 246 - DNA, 1776 bp, Homo sapiens
  misc_feature (1748)..(1748): n equals a,t,g, or c
agccactgtgcccagcctcggctcaggtttttmaatacagtcttgaccttggcattcagtatcctcacagcatggttctaattaactttctagctctatttcccttttcctgctccctctctctacaactagtctttctctgattgccccgccctcaacccatctaaactagaccccagggaagcaccttggtccccttcctctctcccactcaccatccaaccaatcaccagagcctgtacattctatattttcaacatcgattcaattgtctacttctttctagcctgccctctctgactgggactccttgagccagcctgatcaccccaatccatccctcacactgtgcccatctttctgaagtaggaatctgatcacaccamcctgctaaaaacactctggttctccccacggcatgtggtgcccttgtatagctggcaaagccttgcatggcacggccccagcctgtgcttcaactcaattgcccgactctctccagctctgctgagccacctaagtcacagatggtttctcctctcatctctgctctcttccatgtgccatttctgtggcttggaatgttcttccctcattctctttctggccctttcccgtcacaccttagacgtgcatcttcctctcgaaaacctctagtgaagcctcccagggccaggcagtaccctcctctggcttcttctggatacagaggaagaatctgagcatcgattctccatctcagcaggcctctgtgtgcctgctgactccgactagaccagagatccgtaaggacagggatcgagttttttttcttttaatkcactgcctcaaaaatcctctgtgcattacctattcatcctcttctctcccttaacctgaaccagtgatcttactgtctccatcattgtttttttcttttcttttcttttcttttttttttttgaggtggagtctggctcttcacccaggctggagtgcagtgatgcgatctcgactcactgcaacctccatctcctgggttcaagcgattctcctgcctcagcctccccagtagctgggattacaggcatgcgctaccatccccaactaatttttgcctccataattytgccttttstagaatgtcatacaggtggaattactcagtatgctgcctttttcagattggcttctttcacttagtaatatgstygttttttgagacagggtcttgctctgtcgcccaggctagagtgtggtggtgcgatcttagctcactgaaacctccacctcccaggttcaagtgaytctsctgcctcagcctcccgagtagctgggactacaggcacgtgccaccatacccggctaatttgtggatttttagtacagacggsgtttcgtcatgttggccagtgtgytgttgaattcctgacctcaagtgatccacctgcctcagcctcccaaagtgttgcgattacaggtgtgagccactgcgccaagcctcatttagtaataygcatttaaactttctccatgkctttaatggcttgatagctcatttatttttatcawggaatatttcattgtctggatggaccacagtttatttctccattcacctactgaaggacatctcggttgcttctaagttttggcaattatgaataaagctgctataaccatcaagtgcaggtttttgtgtggacctattatcaactaattcgggtaaatctcaaggagtgcaattgctggatccacagtaagagtgngtttagttttaagtgcttggccattttc

SEQ ID NO: 247 - DNA, 784 bp, Homo sapiens
  misc_feature (1)..(1): n equals a,t,g, or c
  misc_feature (6)..(6): n equals a,t,g, or c
  misc_feature (32)..(32): n equals a,t,g, or c
ngagtntaattgctggatcacacagtaagagngtggttagttttaagtggctgtgccattttgcattcccaccagcaatgaatgagagtttctgttgctccacattctcactaccattcggtgttgtcagtgttttgcattttggccattctagtaggtgtttacatggtatctagtcatttgaatgggcatatgatgtggaacatctttttttttttattttwttattattatactttaagttttagggtacatgtgcacaaygtgcaggttwgttacatatgtatacatgtgccatgytggtgtgctgcacccaytaactcgtcatytagcattaggtatatctccyaatgctattggaacatcttttcatgtgtttatttgccatctgtatatcttccctgatgagttggggatgcattctttccatctcagagtccccagaaactaacatagcagttggtacagagttggtgctcaacaaacatcagcttaggaactatgtcctatgtttttttgtttttttttttttttaaaaaggaatgtgagctgttcccaaaacgtatgtccttcccccatgcctctaccctgcccttccacaaactttctgatcttcagcacacactacccaaccatcaaggctgagacttcccgtggccagcagtgtctcatgctggcttcaagccccacagcactgcttttttcaacttctcttgtggtttagactgtctttagcccagcaagagaattcgatatcaagcttatcgataccgtcgacctcgag

SEQ ID NO: 248 - DNA, 699 bp, Homo sapiens
  misc_feature (12)..(12): n equals a,t,g, or c
  misc_feature (30)..(30): n equals a,t,g, or c
  misc_feature (46)..(46): n equals a,t,g, or c
  misc_feature (66)..(66): n equals a,t,g, or c
ggttcatgcttnaaccccatttgctggatnctgctttgaccctgtntccctgtactggtgttatgngaatcctggcacacattgctatcccactctgagaggmcwtgagcaaagaamccccagtrgcagaagccacattgtgctcaggtcttagttctaacaaacaccattccccattaaaaggaaccaggctccttagagaaatggatgattccagggctgtggcagggtaggtacaagatgaacctaaagtgtcgttttataccagaaagtaagaaagtattaaagtgtttaaaaaagtgatgggagcatatcacaaggattcagaagggataccaactggctaaatctggaacaatttgatcaccaaagtaagtacaataataaattctaagctattgaagtaaaggcatttattatgtgtagtaataataaatagataatgagagagaaatgaggactcatgcttacagtaaaatgccaggagctgactggcataaatgtggaaggaaggctggagtgggaaaattattattttgcaaccatcatggtaattaccagatcagataaggatcaacagatgccaaatctagggcaaatttgatgaggagcagaatatttgcactgtctttgagagtttctcccagagatcacttatttgttgtaaaaaaaaagaaaaaaaaaaaaaaaaaactcgag

SEQ ID NO: 249 - DNA, 774 bp, Homo sapiens
  misc_feature (618)..(618): n equals a,t,g, or c
  misc_feature (715)..(715): n equals a,t,g, or c
gtctacctccgggctgaaacgtcaccatgcctccccacagacagacggatggacagatgggcctccctgcacctgctctgtgggtgtgggggctcctgctcagcagcagtttccagacccttctccctgctttccccaagccacccgccttgaatctggggtgctctaccagacccatcccctcatttctaaagatttgagccactagtcgtgtccctctccctcagaaatgccttggtgacacttggctgctttcaactcttccacccatctgcctcttggtctcatctttaccttctgctaaaggtcctgacccccacccccgccacgccatggggcaccccatggtggtgcgtccttgggagcagctctgtccctttccccgtggcctttgccccgcctcctatgacttcgattcccacctgtccccgacccctgggaccactgaccgggcccgatcaccctgtcactgccctgtcatctgcttaccccacacggtgctctgctgacccaggtcttgctgtctcccaayagccccacgaggcttyccgtcgctcctggacactrmaggctgagcccgctgccccgccgcctccatgaggaaggcttttcctctgngagccccaggccaccctttccctcctttaagtaattacttaagtcccttgccagggccctcccagtaccctttctaaagacacccctgccccagcangctgcaggctcctgctccactttcctctcaggccctcgtcgctgtggtgctgcctttga

SEQ ID NO: 250 - DNA, 1396 bp, Homo sapiens
  misc_feature (1187)..(1187): n equals a,t,g, or c
  misc_feature (1325)..(1325): n equals a,t,g, or c
  misc_feature (1327)..(1327): n equals a,t,g, or c
cctcgagccatgtgtccaggtggggcagatcatggagggcgcccaggtgcggtgctgaggctgagcatgcactggctggggagggtgggcagagcaggaggaaatcccttgttctccggagctggagagccagaaagagccctgcagcctgggcctcatcatcacacctcgccctcaaggcctccaggcacagcatccactgccagcctctgctcctgcctctgagggtctgtctccaaggtcttttgggggctgccccagctcccccaacacagacagcaccagagctgggcccacctgtgaggtgctgagttccccatctcagagactgtgcgagcagaggcagggaggcgcttgatgtcggatggagaaaggacaggggaggggtgtggggctcagggccccgccaggtgaaggaacaagcttggaagggtgtccttatgtctgagagttggggagacacccccaagccccagatggrcctcgaatgccaggcagggccaagctgggcccagaagtgggawggwtcccttggctgccccaggaatgcaggttccggggcaagaatccagccctggctggttgaagtccatcccaagtctccctccccacgaggctcctgcagatgccaggaatggggctggattccagattccaagcctggcsgcccagcccctatctgggaccccagcccagagcccccaggcctggcctccaacctggccccagcctcaggggagctgaattcagagaatcctgtcctaggagccagaagcgggggagggaggragggcggccctgtcctgggtgcaggcccgggggctgggggytgcccgcccgtctgggtcagccgcagctgcaaaccggccctggctgagtcatggsgcctccatctccagggcctggcttgaggtggggaatagcagtgaggttggacatccaggcacctgagggtgggcagggctccctgcggctggggtggccagtggcacctggctgttgcccccctgcaccccagccctttggcccccaagtctctgccacctccctggggttctgctcccatattcctcacacccagcacagaacccagcatgtctcctgtagacacctgcatataaaccctgactcacacacacacacacacacacacacacgcacacatgcaggccaggctcctcggccangtcaccctaccggcagagctctagacatttctggcctctggtgactattcttcaggcagctcaccctgcaagtctttattgagcacctactgtgtgccaggcagtggtacagcaagggcagaagccccacctccaagnanctgaacccctgccgtggcagagacagaaaacaaaggcagcaccacggcgacgagggctaaagagaacgc

SEQ ID NO: 251 - DNA, 1397 bp, Homo sapiens
tcgacccacgcgtccgctgaattgcggccgtatgcgcggctctgtggagtgcacctggggttgggggcactgtgcccccagccccctgctcctttggactctacttctgtttgcagccccatttggcctgctgggggagaagacccgccagctgcttgagtttgacagcaccaacgtgtccgatacggcagcaaagcctttgggaagaccatatcctccatactccttggccgatttctcttggaacaacatcactgattcattggatcctgccaccctgagtgccacatttcaaggccaccccatgaacgaccctaccaggacttttgccaatggcagcctggccttcagggtccaggccttttccaggtccagccgaccagcccaaccccctcgcctcctgcacacagcagacacctgtcagctagaggtggccctgattggagcctctccccggggaaaccgttccctgtttgggctggaggtagccacattgggccagggccctgactgcccctcaatgcaggagcagcactccakcgaacgatgaatatgcaccggccgtcttccagttggaccagctactgtggggctccctcccatcaggctttgcacagtggcgaccagtggcttactcccagaagccggggggccgagaatcagccctgccctgccaagcttcccctcttcatcctgccttagcatactctcttccccagtcacccattgtccgagccttctttgggtcccagaataacttctgtgccttcaatctgacgttcggggcttccacaggccctggctattgggaccaacactacctcagctggtcgatgctcctgggtgtgggcttccctccagtggacggcttgtccccactagtcctgggcatcatggcagtggccctgggtgccccagggctcatgctgctagggggcggcttggttctgctgctgcaccacaagaagtactcagagtaccagtccataaattaaggcccgctctctggagggaaggacattactgaacctgtcttgctgtgcctcgaaactctggaggttggagcatcaagttccagccggccccttcactcccccatcttgcttttctgtggaacctcagaggccagcctcgacttcctggagacccccaggtggggcttccttcatactttgttgggggactttggaggcgggcaggggacagggctattgataaggtccccttggtgttgccttcttgcatctccacacatttcccttggatgggacttgcaggcctaaatgagaggcattctgactggttggctgccctggaaggcaagaaaatagatttattttttttcamaaaaaaaaaaaaaaaaaaaaaaaaaaaaaaaaaaaaaaaagggcggccgc

SEQ ID NO: 252 - DNA, 1368 bp, Homo sapiens
ctgaattgcggccgtatgcgcggctctgtggagtgcacctggggttgggggcactgtgcccccagccccctgctcctttggactctacttctgtttgcagccccatttggcctgctgggggagaagacccgccagctgcttgagtttgacagcaccaacgtgtccgatacggcagcaaagcctttgggaagaccatatcctccatactccttggccgatttctcttggaacaacatcactgattcattggatcctgccaccctgagtgccacatttcaaggccaccccatgaacgaccctaccaggacttttgccaatggcagcctggccttcaggtccaggccttttccaggtccagccgaccagcccaaccccctcgcctcctgcacacagcagacacctgtcagctagaggtggccctgattggagcctctccccggggaaaccgttccctgtttgggctggaggtagccacattgggccagggccctgactgcccctcaatgcaggagcagcactccatcgacgatgaatatgcaccggccgtcttccagttggaccagctactgtggggctccctcccatcaggctttgcacagtggcgaccagtggcttactcccagaagccggggggccgagaatcagccctgccctgccaagcttcccctcttcatcctgccttagcatactctcttccccagtcacccattgtccgagccttctttgggtcccagaataacttctgtgccttcaatctgacgttcggggcttccacaggccctggctattgggaccaacactacctcagctggtcgatgctcctgggtttgggcttccctccagtggacggcttgtccccattagtcctgggcatcatggcagtggcctgggtgccccagggctcatgctgctagggggcggcttggttctgctgctgcaccacaagaagtactcagagtaccagtccataaattaaggcccgctctctggagggaaggacattactgaacctgtcttgctgtgcctcgaaactctggaggttggagcatcaagttccagccggccccttcactcccccatcttgcttttctgtggaacctcagaggccagcctcgacttcctggagacccccaggtggggcttccttcatactttgttgggggactttggaggcgggcaggggacagggctattgataaggtccccttggtgttgccttcttgcatctccacacatttcccttggatgggacttgcaggcctaaatgagaggcattctgactggttggctgccctggaaggcaagaaaatagatttattttttttcaaaaaaaaaaaaaaaaaaaaaaaaaaaaaaaaaaaaaaaaaa

SEQ ID NO: 253 - DNA, 1763 bp, Homo sapiens
ccacgcgtccgattcaagtgatcaagattttaaaatatgaaaagaaactggccaaaatgtgctttttaatgatattcaccttcctggtctgttggatgccttatatcgtgatctgcttcttggtggttaatggtcatggtcacctggtcactccaacaatatctattgtttcgtacctctttgctaaatcgaacactgtatacaatccagtgatttatgtcttcatgatcagaaagtttcgaagatcccttttgcagcttctgtgcctccgactgctgaggtgccagaggcctgctaaagacctaccagcagctggaagtgaaatgcagatcagacccattgtgatgtcacagaaagatggggacaggccaaagaaaagtgactttcaactcttcttccatcatttttatcatcaccagtgatgaatcactgtcagttgacgacagcgacaaaaccaatgggtccaaagttgatgtaatccaagttcgtcctttgtaggaatgaagaatggcaacgaaagatggggccttaaattggatgccacttttggactttcatcataagaagtgtctggaatacccgttctatgtaatatcaacagaaccttgtggtccagcaggaaatccgaattgcccatatgctcttgggcctcaggaagaggttgaacaaaaacaaattcttttaattcaacgggtgctttacataatgaaaaaaccacttgtggcacacgatgggcatctaacatcatcatcttctaatgtgttggagattttcatttcaaatatattttttaaattactctattttccaaaacacgtaatgcatttttctcgaaaataccttactgtaaaaataactgtcgcgtacacatgtgtgaagtagctagaacatactgaatttttttttgtactgttggactctattcagtgtcatgtcctatatctgatcaagttatcaaggagataattctagaatgaaaaagaaaatcctcttgttggaaacaaaagacgttttatatgtgcagtatgacaaagaggagtttcagagacaactttgaatccttgtcagcctggagaccagcaccagaggaatctacaaggcaaactcccatatatttgcttcccccaaattgctgcccctacagactcaaagctctttttctttgttttgttgtttctctaaaaatttactgttctttgtcgatgctatataagccagggagttctaagacgccagctctttgagatttgctcattcccctgtatttcccacatatatattacatatacccgctaataaatttatgtttgtttttctcttgtcaatctgtcttttgttataggggccccagccaaggaacctaaagtgggtagaaggaaaaattattttttctttccctacaaactgaacatggattattagaactcaaggttttcattgacaatatagaaaagaaacactgaatcattttattttattgcccaatttttatttcttatatgactctagtgtttcatcttcataattaatcatgtttgaaggatttctgagtgactcagcagcctgttaaagaaggatgaaccaaagaaaacatttcactaaatgtgcttttaaaaatcaagtgtattgctggttctgctgcagtatgtagtcgaagaataaattagtaaattgcttctgagggtctgaaattgaataaagtaatggctttgtatttctataaaaaaaaaaaaaaaaaaaaaaaaaaaaaaaaaaaaaaaaaa

SEQ ID NO: 254 - DNA, 1274 bp, Homo sapiens
gcccacgcgtccgctgttgctcaaaggaaataggagttggtgtgcttgtgaccaaggggttacacttmcagcttttaaaattctcctttacatgtgctcagtgttttgktttgtgttttggtttctgttttttattttaattcccacattgggcacaagaatcagaatatggatagctagtttaagaaacttttgtgggtgcactgtagcatagatgacagaatttgatgttccccccatctccaattcagttcagggcattccacagttaaacagaaatgggaacgtggggctcttataaatgaatgggcgctcacagttttggttttcagctcttcatgtctgtaagtgtgctttggggraggctatgtctgtatggtcgattctcagttatcacatttgcctctcctcccactaccttcatgamcattcagtgctgttcgcactgcagttagagagaagggacggacagttggtgacactcagccacattgctacttttatctgttctggtaagaagttagatagatggtagattgaagcaattgggtagaattagttgggggaatatttatgagttgctgtgtttgttgattagttccatctctttcccattttaactgagaattgattatatatagctctaagtatataggtatttaaacaaccccacaagcggctgtatcagtaacatttattaattccactatagtgagggaggatttccattctaaataccttattttgagggatttataaaacttagttgtaaaagagaaagcccacatagtgggaataaattgcttcagccatttttagtatttgagagcactagggaagatgtttagtagctgtgtggatgccttttttcacaccctgtctattgaatgctgcatccattcacgaagttaaatgttacatgcagttagtccttaatgtggactggatctgtacttttgttttggattaaaacatttaaagatttttgaagtgcagctactccccacgtgcatttgmtacacataaaagtcatactgtgtgtgcacaaagagtacatggattttccagcataytgctttaaaaaattatataaactgttaaaatattaacacctcaggctacctgctgtattctgtcccattgacccctggaattggatttactgcaagtgattgataattcaattatgtggcttttcccctttaatcttgccatttaaattacagtagaaagacaaaatcaagtaaaataaagtgttagataatagaaagagt

SEQ ID NO: 255 - DNA, 2409 bp, Homo sapiens
ccacgcgtccgcttcgacgacgacacctgcagaagtgcggacccgccatgccgcgccacctctcgggactgctcctgctgctctggccgctgctgctgctgctgccgccgacccccgccgcccccggccccctggcccgcccgggtttgcggaggctgggcacgcggggcccagggggcagtcccgggcgccgccctggctctgctgtccccacccgcgcgccctattccggggccggccagcccggcggggcccgaggcgcaggtgtttgcaggagcaggcccttggatttggtgttcatcatcgatagttcccgcagtgtgcggcccctggagttcaccaaagtgaagacctttgtctcccagataattgacactctggacattggggcggcagatacacgggtggcagtggtgaactatgctagcaccgtgaagattgagttccatctccagacccactcagataaacagtccttgaaacaggctgtggctcggatcacacccctgtctacaggcaccatgtccggcctggctatccagacagcaatggatgaggccttcacggtggaggcaggagctcgggggcccacttccaacatccctaaggtggccatcatcgtgacagatgggaggccccaggaccaggtgaatgaggtggcggctcgggcccgggcatctggtattgaactctacgccgtgggcgtggaccgggcagacatggagtccctcaagatgatggccagcgagcccctagacgagcacgttttctatgtggagacctacggggtcattgagaaactctcctctagattccaggaaaccttttgcgctctggacccgtgtgtgcttggcacacaccggtgccagcacgtgtgtgtcagtgatggggaaggcaagcaccactgtgagtgcagccaaggctactccttgaacgccgatcagaagacgtgttcagctatcgataagtgtgctctgaacactcacggttgtgaacacatctgtgtgaacgacagaactggctcttaccactgtgagtgctacgaaggttacaccctgaaccaagacaggaagacttgttcggctcaagaccaatgtgcctttggtacacatggctgccagcacatttgtgtaaatgacagagatgggtcccatcactgtgaatgctacgagggttatactctgaatgctgacaacaaaacgtgttcagttcgcagcgagtgtgctgggggctcgcacggctgccagcacctgtgtgtggacgacgggcccgcggcctatcactgcgattgtttccccggctacaccctgaccgaagaccggaggacgtgcgcagccattgaagaagcacgaagactcgtctctacagaagatgcttgtgggtgtgaagccaccctggccttccaggagagggccagctcatatctgcagagactgaatgccaaactcgatgatattttgggcaagttgcaagcagatgcgtatggacaaatacatcgttgaattactcagatttttcacctggatatacggagagcttggtctatttaatatttttgcatacttcaatgttcctgctaataatttgccattgcaaatgctttaatattactggataagtagtatgaggatcttctagagaatcagtaggacataaacgttcacatccttaagagcaaactttagtgtctctaagctatgactgtgaaatgattcatggggaatagaatgaaaagtttggtatctctttatttaccaattgagccatttaatttttaaatgtttatattagtaagataaccattcttacaatgggaactttttatctattttctcttgatagtatttatagtataaaccagttttattattgagagtgtaaattatacaagtatttacacataaaaaagttcatataattgaggtaaatataatttagaactgtttctttaatgctttgttttttgctcactttttgctggaatatcactgaagctgtgatcaggggattataacacatatcaagatcaagtgaacactacatgaaatattgtaagaaacacataactaaagactttagttttgaattaagtgttataacttcttaccaagttttggtaaaaaatcctacattatctttactgtttcactttaggattcaatcaagaaaattatatacttataaatattgatctaaaaagttaacaacaaacccaatgtcgccattttaaagtttaagcttaacttttcttcacttacatatttagtatatgtattttatttttccgcttgaaagcttatagctcttaggagaaaaccatcctttaaattgtgactactcattttttctgtttgtattgtctttagtataataaaaagttactatctttataaaaaaaaaaaaaaaaaa

SEQ ID NO: 256 - DNA, 876 bp, Homo sapiens
caggtaccggtccggaattcccgggtcgacccacgcgtccgcttcgacgacgacacctgcaraagtgcggacccgccatgccgcgccacctctcgggactgctcctgctgctctggccgctgctgctgctgctgccgccgacccccgccgcccccggccccctggcccgcccgggtttgcggaggctgggcacgcggggcccagggggywktcccgkkcgccgccctgkctctgctgtccccacccgcgcgccctattccggggccggccagcccggcggkgcccgaggcgcaggtgtttgcaggagcaggcccttggatttggtgttcatcatcgatagttcccgcagtgtgcggcccctggagttcaccaaagtgaagacctttgtctcccagataattgacactctggacattggggcggcagatacacgggtggcagtggtgaactatgctagcaccgtgaagattgarttccawctccagacccactcagataaacagtccttgaaacaggctgtggctcggatcacacccctgtctacaggcaccatgtccggcctggctatccagacagcaatggatgargccttcacggtggaggcaggagctcgggggcccacttycaacatccctaaggtggccatcatcgtgacagatgggaggccccaggaccaggtgaatgargtggcggctcgggcccgggcatctggtattgaactctacgccgtgggcgtggaccsggcaracatggagtcccttcaagatgaatggccagcgaagcccctagacgagcacgttttctatgtggagacctacggggtyattgagaaaccttcctytagattccaggaaacccttttgcgctcttggaacc

SEQ ID NO: 257 - DNA, 1586 bp, Homo sapiens
tttattatactaaagmcaatacaamcagaaaaaatgagtagtcacaatttaaaggatggttttctcctaagagctataagctttcaagcggaaaaataaaatacatatactaaatatgtaagtgaagaaaagttaagcttaaactttaaaatggcgacattgggtttgttgttaactttttagatcaatatttataagtatataattttcttgattgaatcctaaagtgaaacagtaaagataatgtaggattttttaccaaaacttggtaagaagttataacacttaattcaaaactaaagtctttagttatgtgtttcttacaatatttcatgtagtgttcacttgatcttgatatgtgttataatcccctgatcacagcttcagtgatattccagcaaaaagtgagcaaaaarcaaagcattaaagaaacagttctaaattatatttacctcaattatatgaacttttttatgtgtaaatacttgtataatttacactctcaataataaaactggtttatactataaatactatcaagagaaaatagataaaaagttcccattgtaagaatggttatcttactaatataaacatttaaaaattaaatggctcaattggtaaataaagagataccaaacttttcattctattccccatgaatcatttcacagtcatagcttagagacactaaagtttgctcttaaggatgtgaacgtttatgtcctactgattctctagaagatcctcatactacttatccagtaatattaaagcatttgcaatggcaaattattagcaggaacattgaagtatgcaaaaatattaaatagaccaagctctccgtatatccaggtgaaaaatctgagtaattcaacgatgtatttgtccatacgcatctgcttgcaacttgcccaaaatatcatcgagtttggcattcagtctctgcagatatgagctggccctctcctggaaggccagggtggcttcacacccacaagcatcttctgtagagacgagtcttcgtgcttcttcaatggctgcgcacgtcctccggtcttcggtcagggtgtagccggggaaacaatcgcagygataggccgcgggcccgtcgtccacacacaggtgctggcagccgtgcgagccmmcagcacactcgctgcgaactgaacacgttttgttgtcagcattcagagtrkaassctcgtagmatwmacagtgatgggacccatctctgtcatttacacaaatgtgctggcagmcatgtgtaccaaaggcacattggtcttgagccgaacaagtcttcctgtcttggttcagggtgtaaccttcgtagcactcacagtggtaagagccagttctgtcgttcacacagatgtgttcacaaccgtgagtgttcagagcacacttatcgatagctgaacacgtcttctgatcggcgttcaaggagtagccttggctgcactcacagtggtgcttgccttccccatcactgacacmcacgtgctggcaccggtgtgtgccaarcacacacgggwccagagcgcaaaaggtttcctggaatctagaggagagtttggcaattt

SEQ ID NO: 258 - DNA, 1011 bp, Homo sapiens
  misc_feature (2)..(2): n equals a,t,g, or c
cnccctttttttttttttttttttttttttttttttttttttttttttttttttttttttttgcagcttaaaagcattttattaagcatttttggatgttgcttcctaccacttaagaataaaaaatgcattttaataaaaacaaatctatactgaagtcattttcctttgtgagaggaaatatgaatgaaatacattcatacttaaaaacagagtattttactgccaaaactttaaatatctcaagagcataccacattttaaacacattatggtcatgtagctatttcaatattcctgggagtggtgggcaattagcctgtctatggcttaggatctgtttccatgcttgcttcctgagcttcttctacctctgagagtttttcatcattttccaatgtttgctgaagttcatggatggtactaagaagaacatgaaactgtttccgtctcaattccagcttatcttcaacactttctttaatgtgtgaaagatgctctaattcttttcccagagcctctagttcctttaatgtctcatgcctgtctggatggtgctgaatcacttttgccaaagcatcatattcttggcgattttttcgtattcgttttgcttgaagaatttgctttttgcactcagcaattttttcatgtgctccagctatgctacattctatttccttgtaaattttttcataattttccatttctctgagattcatatcatatactagtaaagttttgcccattgaaaattcacattgagacagcgtgctcagcatacgttggtactggctatatccctcttcctgggacccagagttgcaccatttaatgaaactcttcactagcagattaattctccgatcatctccagcaccatctccatcaatgaggagacgcttccgtataattcgtcgtcagtcacggctcccatggcgtgcgcggcggcggcggcgggcaagctgaggcggcggttggcggcggcggcggaggtcaaactcccacaat

SEQ ID NO: 259 - DNA, 1395 bp, Homo sapiens
  misc_feature (1338)..(1338): n equals a,t,g, or c
  misc_feature (1382)..(1384): n equals a,t,g, or c
  misc_feature (1390)..(1390): n equals a,t,g, or c
tcgacccacgcgtccgggagccatggcgccgtccgggccgctgctgctggtgctgctcgtgccgctggccgccgcgcggccgggccctacttccgtcccggccggggctgccgcctgcccctgcggggggaccagctgtcggggctggggcgcaggacctacccccggccgcacgagtacctgtccccatctgacctgcccaagagctgggactggcgcaacgtgaacggggtcaactatgccagtgccaccaggaaccagcatatcccccagtactgtggctcctgctgggcccacggcagcaccagtgccatggcggaccggatcaacatcaagagaaagggggcgtggccctccamcctgctgtccgtgcaacamktcytcgaytggcgccaacgcgggytctgtgagggggcaackacctgccggtgtsgacgtacgcccatgagcamggcatcccggacgagacctgcaacaactaccaggctaaggaccaggaatgcaacaagttcaaccagtgtggaacatgcacggaattcaaggagtgccactacatccagaactacacgctctggaaagtgggtgactacggctccctctccggcagggagaagatgatggcggaaatctatgccaacggccccatcagctgcggtatcatggccacggagaagatggtgaactacacgggaggcatctacgcggagtaccaggatcaggcctacataaaccacgtcatttctgtggtcggctggggcgtcagcgacggcacggagtactgggttgtccggaattcgtggggggaaccgtggggggagcacggctggatgaggattgtgaccagcacctataaagacgggcagggcgccagttacaacctcgctgtcgaggacacctgtacgtttggggaccccatcgtttaagggacaggtctccccagaagagcagtgttatcgtgaaccataatcagggggtcctatcgctctgggcactgggttggttccaccatggtctgaagggactggggactggcatcaaacgtgtctgatggctgctcgcggccccgtgcgcccagaagggagaaggggcgcctgtcagcacacagcctgccgcggcgccggccgggagcgcgctcctggggaagagtctgcaatgggacggctgagagccccgggccggccactgccctgcccagtgtctgcctggccaccgtgtgatccgcaaggcccaaacgatgtgactgcaagcttctctgtccctgatttggtgtttcctgtctggcagctgtggtccatgatgtggtgcggaagcccaagcttctcaaagctcttacgttgnctgggattcggtgggggggagtcggggggtggaaggagaaagcnnnccttgnaagat

SEQ ID NO: 260 - DNA, 270 bp, Homo sapiens
  misc_feature (260)..(260): n equals a,t,g, or c
tgtcagcacacagcctgccgcggcgccgccgggagcgcgctcctggggaagagtctgcaatgggacggctgagagcctcgggccggccactgccctgccccagtgtctgcctggccaccgtgtgatccgcaaggcccaaacgatgtgactgccaagctcctctgtccctgatttggtgtttcctgtctgcagctgtggtccatgatgtggtgcggaagcccaggcttctcaaagctcttacgttgctgggattcggtggnggggartcgg

SEQ ID NO: 261 - DNA, 2324 bp, Homo sapiens
  misc_feature (15)..(15): n equals a,t,g, or c
  misc_feature (23)..(23): n equals a,t,g, or c
  misc_feature (36)..(36): n equals a,t,g, or c
  misc_feature (92)..(92): n equals a,t,g, or c
  misc_feature (95)..(95): n equals a,t,g, or c
  misc_feature (107)..(107): n equals a,t,g, or c
cgccaaacccgcctnttccccgngcgtttgccgtcntttaaatgccaggatcgatccagccatgataagatccattgatgagtttggccaanccncaacttagaatncagtgaaaaaaatgctttatttgtgaaatttgtgatgctattgctttatttgtaaccmttataagctgcaataaccaagttaccamcamcaattgcattcattttatgtttcaggttcaggggraggtgtggraggttttttaaagcaagtaaamcctctacaaatgtggtatgsctgattatgatcatgamcagactgtgaggactgaggggcctgaaatgagccttgggactgtgaatctaaaatacacaamcaattagaatcactagctcctgtgtataatattttcataaatcatactcagtaagcaaaactctcaagcagcaagcatatgcagytagtttaacmcattatacacttaaaaattttatatttaccttagagctttaaatctctgtaggtagtttgtccaattatgtcacaccacagaagtaaggttccttcacaaagatcccaagctagcttataatacgactcactatagggagagagctatgacgtcgcatgcacgcgtaagcttgggcccctcgagggatcctctagagcggccgccctttttttttttttttcatcttttatttatttattatttttttttactaaggcacatgacgtagaaatattgaggtacaaaatgcaaatttctgcataagatttttaagatattcattttggaaaatgaaggtgaacatcatctcccagaatattcagcttttagcttgttttttcttttggaccagttcaaccagcaacttgtacctagcgatacagtcttccttgctcttggacgggacacatctggctattttgtcccagcggtcagaggatccccttgggtactgctgcaacgccagttccagaagtttctgttgattttgagtccacggctcctctgcagaccgagctctctcttttctcaggctctcctcgtcgctggactcgttttgttctgctatgtcaaagtccttctgccgcttggctctggacttctcctctggctccggcttcgctgtagcctccagcagcctggctggcttccgcctccgaggccgggcatcagtggccccggtctcctgctcaccggagtctccctcctgctcctcctccgctgccaccccctctgcgtcctctcgctgggtgatcatgtcatcgggcaaggtggtggccgttttgatgggcctggaattctgaactgtcgatttgagttcggagagtctaaccattcctggggagcaggtcactgaatccttcagttgcttggctttggttgtcacatctgtcacagatcgacccaattcgtgggcaatcttttcccatcgacctggagtccctcctgggaacttaaccatacttcttgtcagttggctgaggtcctcttctgtccattcaggtgcctgttttttctgtgttcggttcctgttttccaaccaatcatccatttgttcctcaatttcttctatggaagttccatgatcataagactgaatatatgtagtttctaaaggtgtgtatacaggaaattcaggttttggttttttaactttcttctgtttttgaagtgtttcaagttcagttctagtcagtgcatcttccttttccttcaatcttgtttctttatatttagcataaaactgcccagcatcctggatgaggtgaggtaatgcttttagtgtaaggcaaaaccaaatccccagtttgcatggaagcaaatcatgccactgtggtttcatcagcaatctttcatttttttctgaagcaccgagttttgatacatccacactcttgctgccagtcttttttttcttttctctcttttttctacttagtagttcatccagttgtttttccaggtagattgaccaaaccacagcataatgacccactgtgagaataatgaacaagagtaatgccagctcagcattgctcatttttctcacccgcctgtagtagaatacaggctgtcgccaatctggaagtccattgatcagaatatcatcatacctctgccttcgttcatcatcctttaaaacttcataaatggccaccaattgtctaaactgagtttctgcattttcatctttattcttgtctggatgtaaagttagtgaaagcttacgatatgcttttctgatgtctgcagatgatgcatcctgctgcaccccgaggaactggtagaagttgagcggacgcgtgggtcgacccgggaattccggacc

SEQ ID NO: 262 - DNA, 585 bp, Homo sapiens
  misc_feature (570)..(570): n equals a,t,g, or c
gcttcctgcacctggtgacgcttggcgaaactgaggtctcatggagaagccccggagtattgaggagaccccatcttcagaaccaatggaggaagaggaagatgacgacttggagctgtttggtggctatgatagtttccggagttataacagcagtgtgggcagtgagagcagctcctatctggaggagtcaagtgaagcagaaaatgaggatcgggaagcaggggaactgccgacctccccgctgcatttgctcagccctgggactcctcgctccttggatggcagtggttctgagccagctgtctgtgagatgtgtggtatcgtgggtacaagggaagccttcttctccaagaccaagaggttctgcagcgtctcctgctccaggagctactcctccaactccaagaaagccagtatcttggctaggttacagggaaaaccaccgaccaaaaaagccaaagtcctkcacaaggtgcctggtctkccaaaattggagccttcctccaatctcaaaggacaggacagctggcaratkggacaccaacaggacaagacgctctggtcttnggcttcgactggggg

SEQ ID NO: 263 - DNA, 4344 bp, Homo sapiens
  misc_feature (754)..(754): n equals a,t,g, or c
  misc_feature (2242)..(2242): n equals a,t,g, or c
tgagaatccttgtggctttgattcggagtgtctgaacaggatgctgatgtttgagtgccacccgcagtgtgtcccgcgggcragttctgccagaaccagtgcttcaccaagcgccagtacccagagaccaagatcatcaagacagatggcaaagggtggggcctggtcgccaagagggacatcagaaagggagaatttgttaacgagtacgttggggagctgatcgacgaggaggagtgcatggcgagaatcaagcacgcacacgagaacgacatcacccacttctacatgctcactatagacaaggaccgtataatagacgctggccccaaaggaaactactctcgatttatgaatcacagctgccagcccaactgtgagaccctcaagtggacagtgaatggggacactcgtgtgggcctgtttgccgtctgtgacattcctgcagggacggagctgayttttaactacaacctcgattgtctgggcaatgaaaaaacggtctgccggtgtggagcctccaattgcagtggattcctcggggatagaccaaagacctcgacgaccctttcatcagaggaaaagggcaaaaagaccaagaagaaaacgargcggcgcagagcaaaaggggaagggaagaggcagtcagaggacgagtgcttccgctgcggtgatggcgggcagctggtgctgtgtgaccgcaagttctgcaccaaggcctaccacctgtcctgcctgggccttggcaagcggnccttcgggaagtgggaatgtccttggcatcattgtgacgtgtgtggcaaaccttcgacttcattttgccacctctgccccaattcgttctgtaaggagcaccaggacgggacagccttcagctgcaccccggacgggcggtcctactgctgtgagcatgacttaggggcggcatcggtcagaagcaccaagactgagaagccccccccagagccagggaagccgaaggggaagaggcggcggcggaggggctggcggagagtcacagagggcaaatagcgccaggcggccgcttggccggatccaggggcggtgcagggcggccggccctgcctgcgggagagggcgagcatgaactggcccggaggacccagctcgagccgccaggacacagacgtacaggcctcctcgggagggagcgcctccccaccactgagccatcctcagcagcgtccgctgcgtctgcactgatgaccgtctgagcccagctcagcgttcctggacaaacagcctcactcctcagcgttaccgccacacttgaatttctccgaatgtcaaggttccctcccactctatttttttaggttaaagttaattggcatatggaatgttttaatctcctctgaaatgtgtagcgtaggcttttcccaagggtcgctagaaactcgtcttcgcgttgccccctttctggctctcagcgccgtcgccactcgggagaggctgggtgaggcccgtgtgaggactgaccctggattcctcgaaactgccattgtgatcattactctgctctttggaaatggctgtatcatttttttgtactaatgtgaattgttcctcagaaacgcttcttttccatcctagtgagaagctggccctgcaggtggtggcagcaatggtgttgtaagatttcctcccgtagttttttctcctcatggatttgaatgaaatgccaataacacgtccactttcaacgtgtagtttacgcggagcactttcgaggcctggccgggttgggcctacttctcacctgggcctatcttctgaactcgctaggttcttatcaacatttgggggataactttgtatatttttttcatttggcttttctttaccagtttctgatttttattctcaatatatttttgctaaacctatttcacaaatcaccaccgactgaagtgtgtgtttactgatgcggccctgagctccatggcgaaaggagtgactttgcagggcgtgagaccgcagtctgcttagagcacaggaagtgacaacttagggagccccgtagggcgctgcaggccccggggaccccagcacgtgggtctaaagagagacggagtctagctctcctgccacccagagtggcttccatctcagcactctgtgggtctggtgatggaagatgcagtctctgctgatcacatgtgccctctgccagggcacctactgagaggtgcggtcctgggggtggaggcctgcctggcangtgtgsgtgcctcgtacgtgtgttatgggcactggtctaggccaggtatgacacccactctyctgtgagatttcactttagtttttaaaaggtccagttctacagagtgagacctatctatctgagtactacatatgttttaagacttggttctttttttgagggatccttgaccctgggaagtctggagcaccctgagaagggggcaccatgtgtgcctttgcccacgtgtcctgaggggctgcttgtctgggagggagggagagaacattcagcagcaggtgcttttttatggccttttcttaaaataacctaagggggacacatccatcttgcagagaagtttacagaactccccttgaaaactgctgctgaggctcctgttaaattttctgtggcatcttttatgccttggtaaaaactgcagtgtctttggacctgagagtggctactccgtggttttgtgacctgtaagcgtggggttcaggggtgtgtggccctgcagggtcccacgcctccctgagcactgactggaagtttcactggctggtggctgtcccttctcccatcagggtccccagcaaagttaactacacagaggacccaggggaaacgagctgtgtagccactgacttgctcgcgcggccgtggcctctgaggggcactcgccggttaagacagggtgggagtagtgctttccagttcagactctaacttctcccaaagtgtcctaagaaaatactggatcggctcatagatttatgctccttatgatgccctaacttggaaggttgttctagggacaggccgggcagtgtccccacacacaccttagagtcgaaggccccagggccccgctgtcacttgcccaaaagatcccttccggcaggtaagggactaccaatgcttacgtcaaaacagcagaatcggctttgcagtgcactttggggagcagatattaacttatttttgtgttggacagtagtgaaatcttgtgatttttaatcgctttgataatacttccaaattttatgatttttctgaaggaaataatgcaaacattttaaatatgtttctccccctttccaaaaactgttaaactaatgagcaagtaacactaactttgaatgtctctacaatacccgttgataactcagtggagccaggctttggggtagcggccctgagcttgcagggtttctcgccactggggctgaccacgcccccagctgtgaccgtgggtgtggctggctctcggccctgcccagctttgttctgaggacgtggtgacttcctgaacatcagcttcaatcctccatcattaatgtgaagcaaaacacaaaaaccgccccaatccctcaggattccttggcatccgaaaccagcatctgcacctaaacccatacccacccgtgtgcgcccacagggggatgtgtccgaatgggcagcttaaaatgtggtcacctgtgggggaaactcttcaggcacctgaagtgagaacccagctgtccgtcctcaggccggcctttcttccggcgacacccgtccatggctggctgggtccccttcgcagtgtttgtctgtcttgacatctaaaccccggcgtgtgcagtgcccatcttccaggactaccttattttccagaattaaacctgttttataattcaagttaatgcaaatgactgtcagttgccaaatatcttgatcctatgagtgtagttgatgactgtttgttagtcagtagagtaaaatgctgtgtccacggggtgtcacagcctcaccataccctgttgaggtgtgaaatgccccgtcagaaattaaatacaaacttaaatgtgcctattggtgtctaaacttcatacaatgtaaggtcagattccttttaggaatactgggtgctgtcaccaggtttgatagttagacttaaaaacttgaaattcactttttggggggagggatatactgaaatagagagttgagacttgccagttgggggaaaatagcatttaaaatggaaagctgtgtttggaaaattgtgtatgagtatttttgtattaaaaacattttaaaggcttttttcttaaaaaaaaaaaaaaaaaaaa

SEQ ID NO: 264 - DNA, 1258 bp, Homo sapiens
aaccctcactaaagggaacaaaagctggagctccaccgcggtggcggccgctggctgaccggcctaaaactaaaatgacatttattccctagctacaaacatcagcgttattatgttaattataccttgccctctatcattataaatggttgccatggtgtttctaaaaataagtgttttaccattaatgtgtagagggcaaacaaagcataaagtactaagggatcatgcttatcctagggtctcacagaagagaggacatatttaattaatcttgtgaattacagaacaggttgtggtccagacaccaagaatcataggggtttttttttaaaaaacctaatagaagtagggtgacctctctctttggtctaagagttctaaaggaaggtaggcatctgtttaattagttggttcaccctggctttacctctggttaatgcttgtgttaataggaaggaaaaatcactttatcttttcttccaagcccctccctgcctgacttacccagactgggattaccagataccaggtgatttatgtggagatgatttttcacctttaaactctaagccaagtgtaagaaactcttgatagctatgtctattttatatcagtcactgagacttttttttaagtttttatttattattaagacaactttgccaaaaaagtcccctaagcacaactatttacatttctttatagcctcttctgatctctaacacatatgcagttttaactgttattttcatagtaactgatcttttgtctaaggatttttacctgaaagcacaatgtattgagtctcttgaaaatcatctttcagatctttttacagaatgaacttatgcactgctactgtagtattctcaaggaatatatgtaaacacaaatgtatgcctgaggttggtttttgcagaaaacagtctctgcttctaaaaacttctatgtctagtcttccataggaaatcctcactgtttaaccatgtgaggagcctaagtcattaaacggatcatgtctgtacattgtgtaatgaatgaaaagcacataaatgtaatctactttgaactttgtaaaaatgatgtgtggaggctattcttgtttctccatctcaagtcctgtgtgtgcacgtgtgtgcaagtgcacatgtgtgtgtgtaataacacattgtaaagaacagaaattactttaaaaaataaacagaaatggagacctgaaaaaaaaaaaaaaaaaaaaaaaaaaaaaaaaaaaaaa

SEQ ID NO: 265 - DNA, 1739 bp, Homo sapiens
ggcacgagagatcctcaggatatctttagccaaaggaaaagctccgcattcccacctggggggaaagctggattgccatgggcacgaatagtggtgcagagtccctggccatcctgaatatccagaatggtgtttctgaagttcttctgcatgagtttcttctgccacctgtgtcaaggctacttcgatggccccctctacccagagatgtccaatgggactctgcaccactacttcgtgcccgatggggactatgaggagaacgatgaccccgagaagtgccagctgctcttcagggtgagtgaccacaggcgctgctcccagggggaggggagccaggttggcagcctgctgagcctcaccctgcgggaggagttcaccgtgctgggccaccaggtggaaggatgctgggcgcgtgctggagggcatcagcaaaagcatctcctacgacctagacggggaagagagctatggcaagtacctgcggcgggagtcccaccagatcgggggatgcctactccaactcggacaaatccctcactgagctggagagcaagttcaagcagggccaggaacaggacagccggcaggagagcaggctcaacgaggactttctgggaatgctggtccacaccaggtccctgctgaaggagacactggacatctctgtggggctcagggacaaatacgagctgctggccctcaccattaggaccatgggacccgactagtcggctgaaaaatgattatcttaaagtataggtggaaggatacaaatgcttagaaagagggaatcaaatcagccccgttttggaaggtgggggacagaaaatggggctacatttcccccatacctactatttttttatatcccgatttgcactttgagaatacatctaaggtcatctttcaaaagagaaaaattggacacttgagtgactttgtttttagttttgtttttgaacattatttatgtgattgttatggaattgtcacctggaaagaacaattttaagcaatgtcatttctagatgggtttctaattctgcagagacacccgtttcagccacatctaaaagagcacagtttatgtggtgcggaattaaacttccccatcctgcagattatgtggaaatacccaaagataatagtgcatagctcctttcagcctctagccttcactcctgggctccaaaagctatcccagttgcctgtttttcaaatgaggttcaaggtgctgctttgcatgcctgccaacccatggaagttgtttcttacttcttttctctcttatttattaaccatggtctgagagttgtttttgttctatgtaacagtattgccacaaaactataggcaaatcgtgtttgcagggagatttctgatgcctctgtgggtgtgtgtaagttaaagtggccacatttaagaaggccaagctttgtagtggttgcacagtcacactgatatgctgatttgctctttctcattgtatgtctatgctttgtcatcagtgctatagtaaattacaaagaaataggtagattgtatgaacatacccacaaatgcctatgatttaggttaccaatgtattctttctcatttggggttttgcttctgtctgtctgtttattggaaacttgtacttcaagtagggggaatcctaattctaataactccttagctaagttttattattcaggcaataaacatgttttcatgtaaaaaaaaaaaaaaaaaaa

SEQ ID NO: 266 - DNA, 538 bp, Homo sapiens
  misc_feature (462)..(462): n equals a,t,g, or c
  misc_feature (498)..(498): n equals a,t,g, or c
  misc_feature (520)..(520): n equals a,t,g, or c
gcttgtaggtactcattgaggtttattgtgtaagatgaatgaatgttgcaaattcctaaacatgtgattcagatgcccaatcttactctgttactttatgaaaattttttaaagctatatgatgttatatcaaaatatgttgttatactttaggataatcggtgtgttagccctgaatttcagcataagtcccatttttttccatgggagtctaggaaagctatatgtttattcagcagcaaaatacagtttggaacttaaataaactattgatcaattctggtcttatgctagaaggaataaagcatcaagaaaaagaaaagattgctgtcaagaccaggaaaattgacaatagagtattagaatgcagaaatgaggggaagtggaaargccascaagtaggagagaaaaagtgcagggacagtagaaagtgaatgtaggagcttctgacccagcactcangaacgcaattcatccctaaaaagctgttgcgtctangttgccagtaaccaattaaaanccgtttgaagtagagtga

SEQ ID NO: 267 - DNA, 1346 bp, Homo sapiens
  misc_feature (5)..(5): n equals a,t,g, or c
  misc_feature (17)..(17): n equals a,t,g, or c
  misc_feature (21)..(21): n equals a,t,g, or c
  misc_feature (36)..(36): n equals a,t,g, or c
  misc_feature (107)..(107): n equals a,t,g, or c
  misc_feature (150)..(150): n equals a,t,g, or c
  misc_feature (323)..(323): n equals a,t,g, or c
  misc_feature (1307)..(1307): n equals a,t,g, or c
  misc_feature (1337)..(1337): n equals a,t,g, or c
  misc_feature (1341)..(1341): n equals a,t,g, or c
  misc_feature (1343)..(1343): n equals a,t,g, or c
tcccntcaaggccgggnggcntgttcttggcctttncaacttttgcctttccactatttagaatgcaggtgtgtctgtcctgcaacccagcttctggctctggaaanccagctgcatcacccatgtgcctggaccttctccagaccatgnaggcccaggcgagtgactcactgccattcagtctccatctttgggcagatccaccatgagacataacttcccagaaatccagttacaaggaggaataagtattgaagacttaagaaatgcattttgcagcaggtcctcgctgtactggggcagcggtccattcatagagcccngctagaatagaggtcacaagctcagaagcttctctaaggcaggcaggaaatttaagtcgatactatgatctgcattgtgggctggaatgaacggaaggtgcctagtctaaacagctgcttgttgctcagctgttgttgccgtattgggaattcaagcctaatgatgtttggtattcccattttcaaaagaagtcaggaaatgcagatttctatgtaaatttttaaaacttctgaactgtgtatgagccatacaaaatacatttgcaggccagtcgacatcctctgatccagaatatcaatttgtgagacaagttgttggtgaggcagcattmcatagtagttaaaagcatacattttagagccagactgcccatgtccaaaccctggtcccatcactcactmccttycatttcacttctctttgcttcactttcctcatcagtaaaataaaaataatatcagtacctacctcatagggtttcatgagcattaaataaattaaaacccataaagtactttcaatgctatcaggcatttagttacatggtaaataagtgtttaaaacatttaaaacaaaagttcaaagataataarcaaggaaacagaaaacctgacaggccagctttggaaccttcttgatggcagatctatcaacatttctccctttggctgggatgaaaaggcatttgggaataaaagatcccataaaaataaatgagaagaagtgaaacaccttcattatggcaattttggtgtcagagcctaaaagacagagggatcaaaatattgcagtactaaaatctgatggtttcatgtagaaatgagatttaagcttattaaaatgtatttctttctggtgttaataacccttcacaagacctgggcaattttgaaagaaggaaagaaaatggttctccctgtggacaaraagaaacaaatgactattaaattttctaatttggagtgaactagggkgrttccccnagtttatgtgggaaggtttcagtgagggtngtangngaa

SEQ ID NO: 268 - DNA, 912 bp, Homo sapiens
  misc_feature (36)..(36): n equals a,t,g, or c
  misc_feature (93)..(93): n equals a,t,g, or c
  misc_feature (158)..(158): n equals a,t,g, or c
  misc_feature (592)..(592): n equals a,t,g, or c
aaaatggttctccctgtggcaagaagaaccaaatgnctattaaattttctaatttggagtgaactaagttgatccctaggtttttgtgggagnccggggtgggggagtccagtggaaagcaattgctggagagtagtccttgttctttgctgacagancaggagcagagtgtggaatgaaaactcaatagcctcctctattctcaagagacaattgacttccatctgtttaaacctccccaggggaccctgctccccccatttccatttactctcctttccaccaacctagggtgacattaagaaaaccaaacccatttgaaacacaagctcttacacatcaaaagtcaggggagaagtctggttgacctgtaagccactgcatgaggcacaaagatgcaaaaaggaactttcaggaacaactgctgctccgaggactctatgtcagatataacatccgctttggcccaaaagtaggcttgagccccagaagaggaggaatgtcmagtatgtttaaaatgtgaaacctttagttatacttgctctttactcagaaaggagagagtattcccttatgccaacgaggtctctgngagttgtttgcactattggtagcaggtgctgcctggggtagctcttatggtctgtgcttgaagtgtgcaccagctgctgccctggacatgactgttggtccctgcatacaagcagccacctttaaacagatcaaatgactcttatgatgacagctgtctcactrtactttcaaactggttttaatttggttacttgcaacctaagacagcaracagcattttagggatgaattgcgttcctgaagtgcatgggtcagaaagctcmtacattcactttytactgtccctgcactttttctatcctacttgctgcccttcca

SEQ ID NO: 269 - DNA, 1177 bp, Homo sapiens
  misc_feature (1095)..(1095): n equals a,t,g, or c
  misc_feature (1115)..(1115): n equals a,t,g, or c
  misc_feature (1142)..(1142): n equals a,t,g, or c
  misc_feature (1162)..(1162): n equals a,t,g, or c
agccaccatgcccggcctagattaaaaatttgaagacatattctctactatgagccaatgaaattactcattttgtttctatcccatttgctgtcccttgcttttggaattttgtgtcttagtgtgactgtgattctttctctccttttgtctttcagcaaacggggattcagcgtccgatcctttggaacagggactcacgtgaagcttccaggaccagctcccgacaagcccaatgtttatgatttcaaaaccacatatgaccagatgtacaatgatcttcttaggaaagacaaagaactctatacacagaatgggattttacatatgctggacagaaataagagaatcaagccccggccagaaagattccagaactgcaaagacctgtttgatctgatcctcacttgcgaagagagagtgtatgaccaggtggtggaagatctgaattccagagaacaggagacctgccagccygtgcacgtggtcaatgtggacatccaggacaaccacgaggaggccaccctgggggcgtttctcatctgtgagctctgccagtgtatccagcacacggaagacatggagaacgagatcgacgagctgctgcaggagttcgaggagaagagtggccgcacctttctgcacaccgtctgcttctactgagcccagcgcccgcatggagccgcctctggagcttcctgttgttcatactttttccttcctgacatttgtttttacttacaggtgttctgctggtgacggtagcattacccaaataaactgtgcatatgaaatgggagaggagatgccaaaacgccagatgaaagcaatcaagtttcttcttttccacttttacttatgagcrggatattgattacaaagtttttcttctttaaccaaaaaggaaagacaacggtttgtgtgcacttcccgacatacctgtgtcttcgtgtgcctgccttccctccctcctccccaccgggccggactgtacagagccctgctgcggcgtgttaggaatgacctggaattgtcaataaacagatgctgctgtcaaaaaaaaaaaaaaaaaaaaaaaaaaaaaaaaaaaraaancaaaaaaaaaaaaaaaaggnggggccgaaggttttttccctttggtnggggttatttttggcttggnattggccttcgtttt

SEQ ID NO: 270 - DNA, 1775 bp, Homo sapiens
  misc_feature (820)..(820): n equals a,t,g, or c
gcggcgcgggtgggggttgtgcgttttacgcaggctgtggcagcgacgcggtccccagcctgggtaaagatggccccatggcccccgaagggcctagtcccagctgtgctctggggcctcagcctcttcctcaacctcccaggacctatctggctccagccctctccacctccccagtcttctcccccgcctcagccccatccgtgtcatacctgccggggactggttgacagctttaacaagggcctggagagaaccatccgggacaactttggaggtggaaacactgcctgggaggaagagaatttgtccaaatacaaagacagtgagacccgcctggtagaggtgctggagggtgtgtgcagcaagtcagacttcgagtgccaccgcctgctggagctgagtgaggagctggtggagagctggtggtttcacaagcagcaggaggccccggacctcttccagtggctgtgctcagattccctgaagctctgctgccccgcaggcaccttcgggccctcctgccttccctgtcctgggggaacagagaggccctgcggtggctacgggcagtgtgaaggagaagggacacgagggggcagcgggcactgtgactgccaagccggctacgggggtgaggcctgtggccagtgtggccttggctactttgaggcagaacgcaacgccagccatctggtatgttcggcttgttttggcccctgtgcccgatgctcaggacctgaggaatcaaactgtttgcaatgcaagaagggctgggccctgcatcacctcaagtgtgtagactgtgccaaggcctgcntaggctgcatgggggcagggccaggtcgctgtaagaagtgtagccctggctatcagcaggtgggctccaagtgtctcgatgtggatgagtgtgagacagaggtgtgtccgggagagaacaagcagtgtgaaaacaccgagggcggttatcgctgcatctgtgccgagggctacaagcagatggaaggcatctgtgtgaaggagcagatcccagagtcagcaggcttcttctcagagatgacagaagacgagttggtggtgctgcagcagatgttctttggcatcatcatctgtgcactggccacgctggctgctaagggcgacttggtgttcaccgccatcttcattggggctgtggcggccatgactggctactggttgtcagagcgcagtgaccgtgtgctggagggcttcatcaagggcagataatcgcggccaccacctgtaggacctcctcccacccacgctgcccccagagcttgggctgccctcctgctggacactcaggacagcttggtttatttttgagagtggggtaagcacccctacctgccttacagagcagcccaggtacccaggcccgggcagacaaggcccctggggtaaaaagtagccctgaaggtggataccatgagctcttcacctggcggggactggcaggcttcacaatgtgtgaatttcaaaagtttttccttaatggtggctgctagagctttggcccctgcttaggattaggtggtcctcacaggggtggggccatcacagctccctcctgccagctgcatgctgccagttcctgttctgtgttcaccacatccccacaccccattgccacttatttattcatctcaggaaataaagaaaggtcttggaaagttaaaaaaaaaaaaaaaaaaaaaaaaaaaaactcgagggggggcccgtacccaatcgccctatgatgtagtcgtattaca

SEQ ID NO: 271 - DNA, 866 bp, Homo sapiens
  misc_feature (14)..(14): n equals a,t,g, or c
  misc_feature (27)..(27): n equals a,t,g, or c
  misc_feature (33)..(33): n equals a,t,g, or c
  misc_feature (105)..(105): n equals a,t,g, or c
cctggcttgctggncaagccttggtgnccatgntgaacaagttttgtggaagttctggggagactccaagaactaccaggaacagggatacgagtgccaggctgnatctcttgctcctctgcagagtcagcaggcttcttctcagagatgacagaagacgagttggtggtgctgcagcagatgttctttggcatcatcatctgtgcactggccacgctggctgctaagggcgacttggtgttcaccgccatcttcattggggctgtggcggccatgactggctactggttgtcagagcgcagtgaccgtgtgctggagggcttcatcaagggcagataatcgcggccaccacctgtaggacctcctcccacccacgctgcccccagagcttgggctgccctcctgctggacactcaggacagcttggtttatttttgagagtggggtaagcacccctacctgccttacagagcagcccaggtacccaggcccgggcagacaaggcccctggggtaaaaagtagccctgaaggtggataccatgagctcttcacctggcggggactggcaggcttcacaatgtgtgaatttcaaaagtttttccttaatggtggctgctagagctttggcccctgcttaggattaggtggtcctcacaggggtggggccatcacagctccctcctgccagctgcatgctgccagttcctgttctgtgttcaccacatccccacaccccattgccacttatttattcatctcaggaaataaagaaaggtcttggaaagttaaaaaaaaaaaaaaaaaaaaaaaaaaaaactcgagggggggcccgtacccaatcgccctatgatgtagtcgtattaca

SEQ ID NO: 272 - DNA, 1237 bp, Homo sapiens
agcaaacccaggaaggtgtggcgtccccgcttcgcgccaagatggtgctggtgctgcgccatcctttgtgtgcccgggaaagggcgttccgggagccgggtcgggggctcctgactcgcactgggcagcatgacggtgcgccggctgtcactgctgtgccgggacctctgggcgctgtggctgctgctgaaggccggcgcagtgcgtggggcgcgggcgggtcctcgcctccccggaaggtgttgtggggcgacatgcggggacgccgggcgggggtggacgttctgggcccagccctgtcctcagaagctgctggggcagaagcccggggctgggggatgccggggatgggtgttggggtgggtgcctccgagaccagaggagccctgttccttggcagggaaggtgtgcacgggccttgcccgatggatggtttagggccatggccctggggtccctggtgagcagtggggccgcctctgcccttggcctgtgagggactgtctgtgctggtcccagaaggctgggatcacctttccactggctcctttgttcgaggtttttcatagacaggctatgtggacaaatgagggcagcgcccacgtctggctggtggaggggctgcggctcctccttggaggggacgcctggccactgctgtccccacaatggggccacccgtggtgcaaggcgtgacaagctgccctctctaggtaagcaggacttgggaggcccctggccaagcctgtggacccggctgggcggcctctgtggtctcaggtttgggtgtgtttggtctggtcagggctcaggggctgctggtccacactggccccatcctgacaattggagctttggggcaaggtccctggagaaggggtcacgtcgggaggaaacagcctgggttttgttgatgcttttctaagaatggagtactcgttttcaagagatttgtcctaattatattttccagcgggtacttatgccaagtattgatgaataattcataaaataagcatctttgtgaattttagtgaatcagaccttaactatcaacggcaatgaatgaacatctaaagtttccaattttaaagtaaagaactggctgggtacagcagttcacgcctgtaatcccagcactttgggaggccaaggctagaggatcgcttgagcccaggagtttgagatcagcctgggcaacataccaagacctcatctgttaaaaaaaaaaaaaaaa

SEQ ID NO: 273 - DNA, 1681 bp, Homo sapiens
cgatggccccgcggccgctctagaaagtcccgttttttttttttttttttttttttttttttttagagtacgttctgcattttatttytgcaggcaacactttgctcaccagcaagaacacagcccraggaagggacccaataacctttcaaaacscaaactgctkcctgcggtgagggcccagggtcctccacggagaggacaggcatcttcctttcccaccaggaaggagtcagcccggagcctctgctatgtgcaaggcggtgtgcaagcaccggctgcggctctttgctgtctcttctttctctttggggctgggctgggtgtgcgttctggtgctgatgctttggcctgtgaggctgagcttggcayctcgacccgttcaattacagcaacgaagaagccactgctragygtggtctcaggggargcccggaggcagtgctcggcacccgggaacgtgctcaggcctcggtggggccaggcaggcagggcgggagctagcctgaaggcgcccgggttctgctgcagcgcatctcgcaccacgtcttcattctcctcctggcagagggagcacgtggagtagacgagccgctgcagggaagggaaagtgagcgcgtggcacagggctcgctgctggaaccctgccagggcatgcagacgcaccgggctaggtgtscctgccccgggmtcctccagctgtctgctcggcatacccgagccactgcaggaaggatccagcaggayrtagtggacctcaygrtagcgyggatcyragggggagaccgccaggaagtcctcctcagccagytcacagcargagacgccagcccrggccagcagcgtggccatggatgccagccgcttggcatccaggtcaaaggcaaagatcttcccttggttcttcagaagagcagccaagtgactggtcttattgcctggggcggcacaggcatcgatgacatgggagcctggcggggggtccagcagcatggctgggagacagctggccctgtcctgcagaatgaggtgtccggcccggtacagtgggtgttcatgcagatctgtctgggcgggaaacaccagcagctccggcatcaaggggtccaggagaaaatgcttccccttgagggctcgtaagtcatcgaggctggaagcccgaccctgataggagaaaccttgtctcttgaaataatcaactacatcatcggagcaggtcttgagagtgttcacacgcacaaatcgaggcagctgggaggctggaccaggcctggatcccacttccaacaggtcctcattccggctcacaccccgatgaaccttgagccgagccaactcagccttgagcctcgcctggtgccggcccaacagagccttccatcggcccccaccccctcgaaagccctttcccaacaacaactcatacactagcaccttggccaggtgcggccgcagcttcttctccgcacggaggaggccggcgctggcgatcacagcatccagcacggcggagtagcgctgcgtttcgcacaccagcgcgtacagctgcttcacgttctggaagttgctggagtacaccaaccccttgatagagcctggcggctctccacgccggccaacacgcctgcagctgcagcatacagccccatgttccgtcgcgctttacggctttgtggcaaaa

SEQ ID NO: 274 - DNA, 1863 bp, Homo sapiens
gactaggccgcgagcttagtcctgggagccgcctccgtcgccgccgtcagagccgccctatcagattatcttaacaagaaaaccaactggaaaaaaaaatgaaattccttatcttcgcatttttcggtggtgttcaccttttatccctgtgctctgggaaagctatatgcaagaatggcatctctaagaggacttttgaagaaataaaagaagaaatagccagctgtggagatgttgctaaagcaatcatcaacctagctgtttatggtaaagcccagaacagatcctatgagcgattggcacttctggttgatactgttggacccagactgagtggctccaagaacctagaaaaagccatccaaattatgtaccaaaacctgcagcaagatgggctggagaaagttcacctggagccagtgagaataccccactgggagaggggagaagaatcagctgtgatgctggagccaagaattcataagatagccatcctgggtcttggcagcagcattgggactcctccagaaggcattacagcagaagttctggtggtgacctctttcgatgaactgcagagaagggcctcagaagcaagagggaagattgttgtttataaccaaccttacatcaactactcaaggacggtgcaataccgaacgcagggggcggtggaagctgccaaggttggggctttggcatctctcattcgatccgtggcctccttctccatctacagtcctcacacaggtattcaggaataccaggatggcgtgcccaagattccaacagcctgtattacggtggaagatgcagaaatgatgtcaagaatggcttctcatgggatcaaaattgtcattcagctaaagatgggggcaaagacctacccagatactgattccttcaacactgtagcagagatcactgggagcaaatatccagaacaggttgtactggtcagtggacatctggacagctgggatgttgggcagggtgccatggatgatggcggtggagcctttatatcatgggaagcactctcacttattaaagatcttgggctgcgtccaaagaggactctgcggctggtgctctggactgcagaagaacaaggtggagttggtgccttccagtattatcagttacacaaggtaaatatttccaactacagtctggtgatggagtctgacgcaggaaccttcttacccactgggctgcaattcactggcagtgaaaaggccagggccatcatggaggaggttatgagcctgctgcagcccctcaatatcactcaggtcctgagccatggagaagggacagacatcaacttttggatccaagctggagtgcctggagccagtctacttgatgacttatacaagtatttcttcttccatcactcccacggagacaccatgactgtcatggatccaaagcagatgaatgttgctgctgctgtttgggctgttgtttcttatgttgttgcagacatggaagaaatgctgcctaggtcctagaaacagtaagaaagaaacgttttcatgcttctggccaggaatcctgggtctgcaactttggaaaactcctcttcacataacaatttcatccaattcatcttcaaagcacaactctatttcatgctttctgttattatctttcttgatactttccaaattctctgattctagaaaaaggaatcattctcccctccctcccaccacatagaatcaacatatggtagggattacagtgggggcatttctttatatcacctcttaaaaacattgtttccactttaaaagtaaacacttaataaatttttggaagatctctgaaaaaaaaaaaaaaaaaaagggcggccgc

SEQ ID NO: 275 - DNA, 1134 bp, Homo sapiens
tccatctacagtcctcacacaggtattcaggaataccaggatggcgtgcccaagattccaacagcctgtattacggtggaagatgcagaaatgatgtcaagaatggcttctcatgggatcaaaattgtcattcagctaaagatgggggcaaagacctacccagatactgattccttcaacactgtagcagagatcactgggagcaaatatccagaacaggttgtactggtcagtggacatctggacagctgggatgttgggcagggtgccatggatgatggcggtggagcctttatatcatgggaagcactctcacttattaaagatcttgggctgcgtccaaagaggactctgcggctggtgctctggactgcagaagaacaaggtggagttggtgccttccagtattatcagttacacaaggtaaatatttccaactacagtctggtgatggagtctgacgcaggaaccttcttacccactgggctgcaattcactggcagtgaaaaggccagggcatcatggaggaggttatgagcctgctgcagcccctcaatatcactcaggtcctgagccatggagaagggacagacatcaacttttggatccaagctggagtgcctggagccagtctacttgatgacttatacaagtatttcttcttccatcactcccacggagacaccatgactgtcatggatccaaagcagatgaatgttgctgctgctgtttgggctgttgtttcttatgttgttgcagacatggaagaaatgctgcctaggtcctagaaacagtaagaaagaaacgttttcatgcttctggccaggaatcctgggtctgcaactttggaaaactcctcttcacataacaatttcatccaattcatcttcaaagcacaactctatttcatgctttctgttattatctttcttgatactttccaaattctctgcattctagaaaaaggaatcattctcccctccctcccaccacatagaatcaacatatggtagggattacagtgggggcatttctttatatcacctcttaaaaacattgtttccactttaaaagtaaacacttaataaatttttggaagatctctgaaaaaaaaaaaaaaaaaaaaaaaaaaaa

SEQ ID NO: 276 - DNA, 626 bp, Homo sapiens
gcccacgcgtccgcctaaacacagtcaccatgaagctgggctgtgtcctcatggcctgggccctctacctttcccttggtgtgctctgggtggcccagatgctactggctgccagttttgagacgctgcagtgtgagggacctgtctgcactgaggagagcagctgccacacggaggatgacttgactgatgcaagggaagctggcttccaggtcaaggcctacactttcagtgaacccttccacctgattgtgtcctatgactggctgatcctccaaggtccagccaagccagtttttgaaggggacctgctggttctgcgctgccaggcctggcaagactggccactgactcaggtgaccttctaccgagatggctcagctctgggtccccccgggcctaacagggaattctccatcaccgtggtacaaaaggcagacagcgggcactaccamtgcagtggcatcttccagagccctggtcctgggatcccagaaacagcatctgttgtggctatcacagtccaagaactgtttccagcgccaattctccttctacaaggatggaaggatagtgcaaagcaggggggctctcctcagaattccagatccccacagcttcagaaa

SEQ ID NO: 277 - DNA, 152 bp, Homo sapiens
  misc_feature (41)..(41): n equals a,t,g, or c
cagcccagcttcatggtgactgtgtttaggtctccctcgtnccgaattcctgcagcccgggggatccactagttctagagcggccgccaccgcggtrgagctccagcttttgttccctttagtgagggttaatttcgagcttggcgtaatca

SEQ ID NO: 278 - DNA, 1760 bp, Homo sapiens
  misc_feature (1693)..(1693): n equals a,t,g, or c
  misc_feature (1748)..(1748): n equals a,t,g, or c
gggaattctccatcaccgtggtacaaaaggcagacagcgggcactaccactgcagtgcatcttccasagccctggtcctgggatcccagaaacagcatctgttgtggctatcacagtccaagaactgtttccagcgccaattctcagagctgtaccctcagctgaaccccaagcaggargccccatgaccctgagttgtcagacaaagttgcccctgcagaggtcagctgcccgcctcctcttctccttctacaaggatggaaggatagtgcaaagcagggggctctcctcagaattccagatccccacagcttcagaagatcactccgggtcatactggtgtgaggcagccactgaggacaaccaagtttggaaacagagcccccagctagagatcagagtgcagggtgcttccagctctgctgcacctcccacattgaatccagctcctcagaaatcagctgctccaggaactgctcctgaggaggcccctggctctgcctccgccgccaaccccatcttctgaggatccaggcttttcttctcctctggggatgccagatcctcatctgtatcaccagatgggccttcttctcaaacacatgcaggatgtgagagtcctcctcggtcacctgctcatggagttgagggaattatctggccaccrgaagcctgggaccacaaaggctactgctgaatagaagtaaacagttcatccatgatctcacttaaccaccccaataaatctgattctttattttctcttcctgtcctgcacatatgcataagtacttttacaagttgtcccagtgttttgttagaataatgtagttaggtgagtgtaaataaatttatataaagtgagaattagagtttagctataattgtgtattctctcttaacacaacagaattctgctgtctagatcaggaatttctatctgttatatcgaccagaatgttgtgatttaaagagaactaatggaagtggattgaatacagcagtctcaactgggggcaattttgcccccaagaggacattgggcaatgtttggagacattttggtcattatacttggggggttgggggatggtgggatgtgtgtgctactggcatccagtaaatagaagccaggggtgccgctaaacatcctataatgcacagggcagtaccccacaacgaaaaataatctggcccaaaatgtcagttgtactgagtttgagaaaccccagcctaatgaaaccctaggtgttgggctctggaaatgggactttgtccyttctaattattatctctttccagcctcattcagctattcttactgacataccagtctttagctggtgctatggtctgttctttagttctagtttgtatcccctcaaaagccattatgttgaaatcctaatccccaaggtgatggcattaagaagtgggcctttgggaagtgattagatcaggagtgcagagccctcatgattaggattagtgcccttatttaaaaaggccccagagagctaactcacccttccaccatatgaggacgtggcaagaagatgacatgtatgagaaccaaaaaacagtgtcgccaaacaccgactctgtcgttgccttgatcttgaacttccagcctccagaactatgagaaataaaattctgttgtttgtaagctaatccagttgtgtaatttggnatagtagcccaaatggactaggcagttggcctctggccacatgatgagttatggnatgtaaaaatac

SEQ ID NO: 279 - DNA, 880 bp, Homo sapiens
ggcacgagactggatgaacacaaactccacatgtatctttctgccttgcagtccttgatcccatctctctttgcattagtgctacagaatgcacctttctccagcaaagccaagcttcatggtgaagtgccacagatagaagtgactaggtttcctcggcctatgtcgcctcttcaagatgtgtccactattatcggaagtcgtgagcaattggcagtgctgctgcaactttatgactaccagctagaacaagagggtacaacaggctgggagagtttactgtgggttgtcaatcaattgttgccacaacttatagaaatagttggcaaaattaatgttacttcaactgcctgtgtccatgaattctccagatttttctggcgcctttgccggacatttggcaaaatttttacaaacactaaggtaaaacctcagttccaggagattttaagactatctgaagaaaacattgattcctcagcaggaaatggggtcctcactaaagctacagtccccatttatgcaacaggagtccttacgtgttatattcaggaagaagaccgaaaactgttagttggattcttagaagatgtaatgacgctgctttcattatctcatgctcctcttgatagcctgaaggcttcttttgtggaattgggtgcaaacccagcctaccatgagttactattaactgttttgtggtatggtgttgtccatacttcagcactcgtgaggtgtactgctgctagaatgtttgaggtatgtcaacacatgcctctgttggtttcaattataatgatttttttttttttgcgaagaagaagggaattttttttaataaaaaggctttgcatatcaaaaaaaaaaaaaaaaaaaaaaa

SEQ ID NO: 280 - DNA, 1106 bp, Homo sapiens
  misc_feature (5)..(5): n equals a,t,g, or c
  misc_feature (857)..(857): n equals a,t,g, or c
  misc_feature (1037)..(1037): n equals a,t,g, or c
  misc_feature (1058)..(1058): n equals a,t,g, or c
tccancattatgggatacattgatgatccagacaaatatcatcagggttttgaattgttgctgtcagccttgggtgatccctcagaaagagtagttagtgctacacatcaagtatttttaccagcttacgctgcgtggactacagaacttggaaatttacagtctcatcttatacttacactactgaacaagattgaaaaacttctcagggaaggagaacatggactggatgaacacaaactccacatgtatctttctgccttgcagtccttgatcccatctctctttgcattagtgctacagaatgcacctttctccagcaaagccaagcttcatggtgaagtgccacagatagaagtgactaggtttcctcggcctatgtcgcctcttcaagatgtgtccactattatcggaagtcgtgagcaattggcagtgctgctgcaactttatgactaccagctagaacaagagggtacaacaggctgggagagtttactgtgggttgtcaatcaattgttgccacaacttatagaaatagttggcaaaattaatgttacttcaactgcctgtgtccatgaattctccagatttttctggcgcctttgccggacatttggcaaaatttttacaaacactaaggtaaaacctcagttccaggagattttaagactatctgaagaaaacattgattcctcagcaggaaatggggtcctcactaaagctacagtccccatttatgcaacaggagtccttacgtgttatattcaggaagaagaccgaaaactgttagttggattcttagaagatgtaatgacgctgctttcattatctcatgctcctcttgatagcctgaaggnttcttttgtggaattgggtgcaaaccaggcctaccatgagttactattaactgttttgkggtatggkgtkgkccatacttcagcactcgtgaggtgtactgctgctagaatgtttgagctgttggtgaagggggtgaatgaaactctggtagctcagagggttgttcctgctcttcattnactctctccagtggaccctgnaaatctctgtcaggattgccacaatttccagcctttgggactatttat

SEQ ID NO: 281 - DNA, 646 bp, Homo sapiens
  misc_feature (19)..(19): n equals a,t,g, or c
  misc_feature (544)..(544): n equals a,t,g, or c
cagatgccagggacttggncttcccccggttgaaccacaggttccaagaaacctgcagggtccagcctcccccccatccccagtyttccccaccctggcccggccctccaggtgcagaaacatgcaggcccctctccaggactgtgggaggagtgtgtccctcagactggcctgtgtcctggctcctcttaccacctcttccagaggttgtcacctgcagctgccccaggataaaggcaaggccagaraggactcctgaactcctgtgtgcctggggtggcaggggcaaacatagccaactggtggcctgagcggggccatggtgargacacccttggtggcttgtcccacatcaagctgggargtgacacttaggatgcatttttcaatattttagtgtttgaataacgggctawcttgagaaaaaaataatttgaatcacacatcacaccaaaaataaattctaggtggattttaacactttccaaaaattattattagtttagagacagggtctcactccgtcgcctaggctggagtgcangggtatgatcatggttcactgcaaccttaaactccctggcctcatatgatccccccgggctccagcccctccaaagttactgggaaactaccaaacatgccc

SEQ ID NO: 282 - DNA, 1590 bp, Homo sapiens
tttttttttttttgtttaaatgatacaacttaattttattaggacagacgctggcggccaccagaagtttgagcctctttggtagcaggaggctggaagaaaggacagaagtagctctggctgtgatggggatcttactgggcctgctactcctggggcacctaacagtggacacttatggccgtcccatcctggaagtgccagagagtgtaacaggaccttggaaaggggatgtgaatcttccctgcacctatgaccccctgcaaggctacacccaagtcttggtgaagtggctggtacaacgtggctcagaccctgtcaccatctttctacgtgactcttctggagaccatatccagcaggcaaagtaccagggccgcctgcatgtgagccacaaggttccaggagatgtatccctccaattgagcaccctggagatggatgaccggagccactacacgtgtgaagtcacctggcagactcctgatggcaaccaagtcgtgagagataagattactgagctccgtgtccagaaacactcctcaaagctactcaagaccaagactgaggcacctacaaccatgacataccccttgaaagcaacatctacagtgaagcagtcctgggactggaccactgacatggatggctaccttggagagaccagtgctgggccaggaaagagcctgcctgtctttgccatcatcctcatcatctccttgtgctgtatggtggtttttaccatggcctatatcatgctctgtcggaagacatcccaacaagagcatgtctacgaagcagccagggcacatgccagagaggccaacgactctggagaaaccatgagggtggccatcttcgcaagtggctgctccagtgatgagccaacttcccagaatctgggcaacaactactctgatgagccctgcataggacaggagtaccagatcatcgcccagatcaatggcaactacgcccgcctgctggacacagttcctctggattatgagtttctggccactgagggcaaaagtgtctgttaaaaatgccccattaggccaggatctgctgacataattgcctagtcagtccttgccttctgcatggccttcttccctgctacctctcttcctggatagcccaaagtgtccgcctaccaacactggagccgctgggagtcactggctttgccctggaatttgccagatgcatctcaagtaagccagctgctggatttggctctgggcccttctagtatctctgccgggggcttctggtactcctctctaaataccagagggaagatgcccatagcactaggacttggtcatcatgcctacagacactattcaactttggcatcttgccaccagaagacccgagggaggctcagctctgccagctcagaggaccagctatatccaggatcatttctctttcttcagggccagacagcttttaattgaaattgttatttcacaggccagggttcagttctgctcctccactataagtctaatgttctgactctctcctggtgctcaataaatatctaatcataacagcaaaaaaaaaaaaaaaaaactcgag

SEQ ID NO: 283 - DNA, 1179 bp, Homo sapiens
gggctgcaggaattcggcacgagtttaaagggtgactcgtcccacttgtgttctctctcctggtgcagagttgcaagcaagtttatcggagtatcgccatgaagttcgtcccctgcctcctgctggtgaccttgtcctgcctggggactttgggtcaggccccgaggcaaaagcaaggaagcactggggaggaattccatttccagactggagggagagattcctgcactatgcgtcccagcagcttggggcaaggtgctggagaagtctggcttcgcgttcgactgccgcaacacagaccagacctactggtgtgagtacagggggcagcccagcatgtgccaggctttcgctgctgaccccaaatcttactggaatcaagccctgcaggagctgaggcgccttcaccatgcgtgccagggggccccggtgcttaggccatccgtgtgcagggaggctggaccccaggcccatatgcagcaggtgacttccagcctcaagggcagcccagagcccaaccagcagcctgaggctgggacgccatctctgaggcccaaggccacagtgaaactcacagaagcaacacagctgggaaaggactcgatggaagagctgggaaaagccaaacccaccacccgacccacagccaaacctacccagcctggacccaggcccggagggaatgaggaagcaaagaagaaggcctgggaacattgttggaaacccttccaggccctgtgcgcctttctcatcagcttcttccgagggtgacaggtgaaagacccctacagatctgacctctccctgacagacaaccatctctttttatattatgccgctttcaatccaacgttctcacactggaagaagagagtttctaatcagatgcaacggcccaaattcttgatctgcagcttctctgaagtttggaaaagaaaccttcctttctggagtttgcagagttcagcaatatgatagggaacaggtgctgatgggcccaagagtgacaagcatacacaactacttattatctgtagaagttttgctttgttgatctgagccttctatgaaagtttaaatatgtaacgcattcatgaatttccagtgttcagtaaatagcagctatgtgtgtgcaaaataaaagaatgatttcagaaaaaaaaaaaaaaaaaaactcga

SEQ ID NO: 284 - DNA, 819 bp, Homo sapiens
gaattcggcacgaggagaatcatgggcctctggctgggcatgctggcctgtgtcttcctggcaactgctgcctttgttgcttatactgcccggctggactggaagcttgctgcagaggaggctaagaaacattcaggccggcagcagcagcagagagcagagagcactgcaaccagacctgggcctgagaaagcagtcctatcttcagtggctacaggcagttcccctggcattaccttgacaacgtattcaaggtctgagtgccacgtggacttcttcaggactccagaggaggcccacgccctttcagctcctaccagcagactatcagtgaaacagctggtcatccgccgtggggctgctctgggggcggcgtcagcacactgatggtggggctcacggtcaggatcctagccaccaggcactagcaaagaagcttggaaatagaaagccaggagtggctgtccccagtatgcaaacacaccacggtctgccctgcaaaaacaccaatggggtctagtgcaggtggacactttgaaccactcctcaaaaaaagaactttggctgatyccttgtggtgacactcagaggggtctgaacagacttgacaattctgttctggtcaagctggagttttcttctgtgacttggactgctctacagaagacatcagccaactgcacgagtcagagtccagggattgtcactattattaataatgtaaatggcttcaaatgggacactgcagataammycacaaaaaccactgttatattaaagattacacatttcctggaaaaaaaaaaaaaaaaaactcga

SEQ ID NO: 285 - DNA, 1792 bp, Homo sapiens
ggcacgaggttgtttgagtttggtttggagcaaaactgaggtagtcctaacatttctgggactgaatccaggcaagagaaagaagaaaaagaagaagaaaaagaggaggaaaaagtggattacacaatgacatggagaatgggaccccgtttcactatgctgttggccatgtggctagtgtgtggatcagaaccccacccccatgccactattagaggcagccacggaggacggaaagtgcctttggtttctccggacagcagtaggccagctcggtttctgaggcacactgggaggtctcgcggaattgagagatccactctggaggaaccaaaccttcagcctctccagagaaggaggagtgtgcccgtgttgagactagctcgcccaacagagccgccagcccgctcggacatcaatggggccgccgtgagacctgagcaaagaccagcagccaggggctctccgcgtgagatgatcagagatgaggggtcctcagctcggtcaagaatgttgcgtttcccttcggggtccagctctcccaacatccttgccagctttgcagggaagaacagagtatgggtcatctcagcccctcatgcctcggaaggctactaccgcctcatgatgagcctgctgaaggacgatgtgtactgtgagctggcggagaggcacatccaacagattgtgctcttccaccaggcaggagaggaaggaggcaaggtgagaaggatcaccagcgagggccagatcctggagcagcccctggaccctagcctcatccctaagctgatgagcttcctgaagctggagaagggcaagtttggcatggtgctgctgaagaagacgctgcaggtggaggagcgctatccatatcccgttaggctggaagccatgtacgaggtcatcgaccaaggccccatccgtaggatcgagaagatcaggcagaagggctttgtccagaaatgtaaggcctctggtgtagagggccaggtggtggcggaggggaatgacggtggagggggagcaggaaggccaagcctgggcagcgagaagaagaaagaggacccaaggagagcacaagtcccaccaaccagagagagtcgggtgaaggtcctgagaaaactggccgccactgcaccagcttttccccaacctccctcaacccccagagccaccacccttcctcctgccccagccacaacagtgactcggtccacgtcccgggcggtaacagttgctgcaagacctatgaccaccactgcctttcccaccacgcagaggccctggaccccctcaccctcccacaggccccctacaaccactgaggtgatcactgccaggagaccctcagtttcagagaatctttaccctccatcccggaaggatcagcacagggagaggccacagacaaccaggaggcccagcaaggccaccagcttggagagcttcacaaatgcccctcccaccaccatctcagaacccagcacaagggctgctggcccaggccgtttccgggacaaccgcatggacaggcgggaacatggccaccgagacccaaatgtggtgccaggtcctcccaagccagcaaaggagaaacctcccaaaaagaaggcccaggacaaaattcttagtaatgagtatgaggaagtatgacctcagccggcctactgcctctcagctggaggacgagctgcaggtggggaatgttccccttaaaaaagcaaaggagtctaaaaagcatgaaaagcttgagaaaccagagaaggagaagaaaaaaaaaaaaaaaaaa

SEQ ID NO: 286 - DNA, 1673 bp, Homo sapiens
ggcacgagagaatgggaccccgtttcactatgctgttggccatgtggctagtgtgtggatcagaaccccacccccatgccactattagaggcagccacggaggacggaaagtgcctttggtttctccggacagcagtaggccagctcggtttctgaggcacactgggaggtctcgcggaattgagagatccactctggaggaaccaaaccttcagcctctccagagaaggaggagtgtgcccgtgttgagactagctcgcccaacagagccgccagcccgctcggacatcaatggggccgccgtgagacctgagcaaagaccagcagccaggggctctccgcgtgagatgatcagagatgaggggtcctcagctcggtcaagaatgttgcgtttcccttcggggtccagctctcccaacatccttgccagctttgcagggaagaacagagtatgggtcatctcagcccctcatgcctcggaaggctactaccgcctcatgatgagcctgctgaaggacgatgtgtactgtgagctggcggagaggcacatccaacagattgtgctcttccaccaggcaggagaggaaggaggcaaggtgagaaggatcaccagcgagggccagatcctggagcagcccctggaccctagcctcatccctaagctgatgagcttcctgaagctggagaagggcaagtttggcatggtgctgctgaagaagacgctgcaggtggaggagcgctatccatatcccgttaggctggaagccatgtacgaggtcatcgaccaaggccccatccgtaggatcgagaagatcaggcagaagggctttgtccagaaatgtaaggcctctggtgtagagggccaggtggtggcggaggggaatgacggtggagggggagcaggaaggccaagccagggcagcgagaagaagaaagaggacccaaggagagcacaagtcccaccaaccagagagagtcgggtgaaggtgctgagaaaactggccgccactgcaccagcttttccccaacctccctcaacccccagagccaccacgcttactcctgccccagccacaacagtgactcggtccacgtcccgggcgggaaacagatgctgcaagacctatgaccaccactggctttcccaccacgcagaggccctggaccccctcacccttcccacaggccccctacaaccactgagggtgatcactgccaggagaccctcagtttccagagaatctttaccctccattcccggaaggatcagcacagggagaggccacagacaaccaggaggcccagcaaggcccaccagcttggagagcttcacaaatgcccctcccaccaccatctcagaacccagcacaagggctgctggcccaggccgtttccgggacaaccgcatggacaggcgggaacatggccaccgagacccaaatgtggtgccaggtcctcccaagccagcaaaggagaaacctcccaaaaagaaggcccaggacaaaattcttagtaatgagtatgaggagaagtatgacctcagccggcctactgcctctcagctggaggacgagctgcaggtggggaatgttccccttaaaaaagcaaaggagtctaaaaagcatgaaaagcttgagaaaccagagaaggagaagaaaaaaaaaaaaaaaaaa

SEQ ID NO: 287 - DNA, 2084 bp, Homo sapiens
  misc_feature (775)..(775): n equals a,t,g, or c
  misc_feature (2080)..(2080): n equals a,t,g, or c
  misc_feature (2083)..(2083): n equals a,t,g, or c
ggcagagggccatttcctgcaaagagccaaacccccattcctctgtgcccctcctctcccaccaagtgctttataaaaatagctcttgttaccggaaataactgttcatttttcactcctccctcctaggtcacacttttcagaaaaagaatctgcatcctggaaaccagaagaaaaatatgagacggggaatcatcgtgtgatgtgtgtsctgcctttggctgagtgtgtggagtcctgctcaggtgttaggtacagtgtgtttgatcgtggtggcttgaggggaaccgcttgttcagagctgtgactgcggctgcactgcagagaagctgcccttggctgctcgtagcgccgggccttctctcctcgtcatcatccagagcagccagtgtccgggaggcagaaggtaccggggcagctactggaggactgtgcgggcctgcctgggctgccccctccgccgtggggccctgttgctgctgtccatctatttctactactccctcccaaatgcggtcggcccgcccttcacttggatgcttgccctcctgggccttctcgcaggcactgaacatcctcctgggcctcaagggcctggccccagctgagatctctgcagtgtgtgaaaaagggaatttcaacgtggcccatgggctggcatggtcatattacatcggatatctgcggctgatcctgccagagctccaggcccggattcgaacttacaatcagcattacaacaacctgctacggggtgcagtgagccagcggtgtnatattctcctcccattggactgtggggtgcctgataacctgagtatggctgaccccaacattcgcttcctggataaactgccccagcagaccggtgaccgtgctggcatcaaggatcgggtttacagcaacagcatctatgagcttctggagaacgggcagcgggcgggcacctgtgtcctggagtacgccacccccttgcagactttgtttgccatgtcacaatacagtcaagctggctttagcggggaggataggcttgagcaggccaaactcttctgccggacacttgaggacatcctggcagatgcccctgagtctcagaacaactgccgcctcattgcctaccaggaacctgcagatgacagcagcttctcgctgtcccaggaggttctccggcacctgcggcaggaggaaaaggaagaggttactgtgggcagcttgaagacctcagcggtgcccagtacctccacgatgtcccaagagcctgagctcctcatcagtggaatggaaaagcccctccctctccgcacggatttctcttgagacccagggtcaccaggccagagcctccagtggtctccaagcctctggactgggggctctcttcagtggctgaatgtccagcagagctatttccttccacagggggccttgcagggaagggtccaggacttgacatcttaagatgcgtcttgtccccttgggccagtcatttcccctctctgagcctcggtgtcttcaacctgtgaaatgggatcataatcactgccttacctccctcacggttgttgtgaggactgagtgtgtggaagtttttcataaactttggatgctagtgtacttagggggtgtgccaggtgtctttcatggggccttccagacccactccccacccttctccccttcctttgcccggggacgccgaactctctcaatggtatcaacaggctccttcgccctctggctcctggtcatgttccattattggggagccccagcagaagaatggagaggaggaggaggctgagtttggggtattgaatcccccggctcccaccctgcagcatcaaggttgctatggactctcctgccgggcaactcttgcgtaatcatgactatctctaggattctggcaccacttccttccctggccccttaagcctagctgtgtatcggcacccccaccccactagagtactccctctcacttgcggtttccttatactccacccctttctcaacggtccttttttaaagcacatctcagattaaaaaaaaaaaaaaaaaaaaaaaagggggggcngcnt

SEQ ID NO: 288 - DNA, 720 bp, Homo sapiens
ggcacgagatttctcacaatgacaaattctcaaatattgctaatagtactgtggattttcctacattggtaaattgaaggaattgctaaatgctgaattcagcaaccagtttgagattgttgaaaataaagattgtttctttttcaatgcaagttcacagatcactggagttctagctacagtttgttctagaccagaggttgcagatatttttgtcctataaagagacacatggttaatatttttggctttgtgagttgtatagttttcgttgtagctgttcagctctgctacatgaagcaaccatagaccataccttaacaagtggtcacttttgagtaccaataaaactttatttagaaataacagagggctggatttggtcctagtttgctgaacccttttctagatgaaggctcctcttgccaagactggctccctaccttggctgacaaattctcactttgggacttagtcattgttgctgctctctgttattttgcatgtcttttctcatgtttaggtgctgtgtcttaatacttttttcttacatttaatttaacaatcattactgagcgctggtatgtctagtttcttttctcttctttcctccttttcttttctttttttctttttctttatttgaaggctctcactctgtcactccagcctgggtggcagaccaggaccctgtctctaaaaaaaaaaaaaaaaaaaaaa

SEQ ID NO: 289 - DNA, 738 bp, Homo sapiens
  misc_feature (646)..(646): n equals a,t,g, or c
  misc_feature (670)..(670): n equals a,t,g, or c
  misc_feature (696)..(696): n equals a,t,g, or c
  misc_feature (707)..(707): n equals a,t,g, or c
  misc_feature (718)..(718): n equals a,t,g, or c
catcagaccacacccagcagtcagaaaagaggtgcaggggcccgggctgggacagtgaagagtgctgggcagtctgtggtcctctgtatctcaactttttcatcttaaaaaaacaaatagggttgtgtgtgtggctggtggtcataaggtcctttctggctctaataacctgagcttctgttatgaagctgggacccttagagcctcaggatgatcctctgtttgtttgtgaagccccaatcaggtgctaagcaccatagtggcacttagctgaagctcctctgtaactcctgtgggccctgccttgcccacccccgacagctgctgcagtgctcctgagcagcacaggcctgatggagcttctggagaagatgctggccctcaccttggcaaaggcagattctcccaggactgcactcctctgctctgcctggctgctcactgcctccttctctgcccagcagcacaagggcagtttgcaggttcaccagacactctctgtggaaatggaccargtattgaaggctctcagctttccaaagaaaaaggctgcactactctcaactgccatcttatgcttcctgcggacagccctgcgacaaagcttttcctctgcctggaaccctggtgcccttaagggcccagncactgcagccaccaaggacactgncctaacttcactgcgaatgtccaagnccggccctggncattgggctgnaaaaacctcctggtgcaaaa

SEQ ID NO: 290 - DNA, 935 bp, Homo sapiens
  misc_feature (6)..(6): n equals a,t,g, or c
  misc_feature (14)..(14): n equals a,t,g, or c
  misc_feature (16)..(16): n equals a,t,g, or c
  misc_feature (50)..(50): n equals a,t,g, or c
  misc_feature (95)..(95): n equals a,t,g, or c
  misc_feature (101)..(101): n equals a,t,g, or c
  misc_feature (139)..(139): n equals a,t,g, or c
  misc_feature (176)..(176): n equals a,t,g, or c
ggccancttttttntnggggaaaaaatgggacccaaaagttatttgaaangggctttttcaagctttttcccaaaaggaaaaaaagggttgccantaattnttcaaggattgcccatctttaatgctttccttgggganaagccttgcgacaaaagctttttccttctgccctggnagccctggtgccttcaggggcccagccactgccagccaccaaggacactgtcctagctccactgcgaatgtcgcaagtccggtccctggtcattgggctgcagaacctcctggtgcagaaggaccctctattgtcccaggcctgtgttggctgcctggaggccttgcttgactacctggatgcccggagcccagacattgctctccacgtggcctcccagccttggaatcggtttttgctgtttaccctcttggatgctggagagaattccttcctcagacctgagattttgaggctcatgaccctgtttatgcggtaccggagtagcagtgtcctctctcatgaagaggtgggtgatgttctgcaaggtgtggctttggctgacctgtctaccctctcgaacaccacactccaggccctgcatggcttcttccagcagctccagagcatgggacacctggctgaccacagcatggcccagaccctgcaggcctccttggagggccttccccctagcacctcctcaggccagccacccctgcaggacatgctctgcctgggaggggtggctgtatccctgtcccacatcagaaactgatcctcaggacttgaaggcccagaagtggagagagaatgagacctggagacaaagggcataattgttggggaaatggatgacagctgaagctattcatatggagccatatactctattgttgaaatagaataaggaaataaaatgatacactcacaaaaaaa

SEQ ID NO: 291 - DNA, 871 bp, Homo sapiens
ggcacgagggaacccagaagatgctgcctctcctgatcatctgtctcctgcctgccattgaagggaagaactgcctccgctgctggccagaactgtctgccttgatagactatgacctgcagatcctctgggtgaccccagggccacccacagaactttctcaaagtattcactccttgttcctagaggataataattttctcaaaccctggtaccttgatcgtgaccatttggaagaagaaacagccaaattcttcactcaagtacaccaagccattaaaacgttacgagatgataaaacagtacttctggaagagatctacacgcacaagaatctctttactgagaggctgaataagatatctgatgggctgaaggagaaggagccccacccctctccatgaatgccttcccggctccatctcctacttgcaccccagaaccccttggcttctgtctgcctccccagcacctcagtttctctaccttctcaccctccctggcagcctgcaatgagtcctgtgccaggaaccggcggacctccctgtgggctgtgagtctcagcagtgctctactcctggccatagctggagatgtttcttttactggcaaaggaagaaggaggcagtaaaggaacagggcagcccgcatgtcttccagaagtgaacagaggccgcagctaccaccgtcacaaagttcactcatctctgggtcccggtgaccccatccccccataccctccatcctgggtcctggggccccaaagctctgaggcctaggagactgcgctgtctcgtggtttgcctactcctacacctttgtaaagagtctcttcattaaaacccctcttcataaaaaaaaaaaaaaaaaa

SEQ ID NO: 292 - DNA, 881 bp, Homo sapiens
gaattcggcacgagggaacccagaagatgctgcctctcctgatcatctgtctcctgcctgccattgaagggaagaactgcctccgctgctggccagaactgtctgccttgatagactatgacctgcagatcctctgggtgaccccagggccacccacagaactttctcaaagtattcactccttgttcctagaggataataattttctcaaaccctggtaccttgatcgtgaccatttggaagaagaaacagccaaattcttcactcaagtacaccaagccattaaaacgttacgagatgataaaacagtacttctggaagagatctacacgcacaagaatctctttactgagaggctgaataagatatctgatgggctgaaggagaagggagccccacccytctccatgaatgccttcccggctccatctcctacttgcaccccagaaccccttggctctgtctgcctccccagcacctcagtttctctaccttctcacctccctggcagcctgcaatgagtcctgtgccaggaaccggcggacctccctgtgggctgtgagtctcagcagtgctctactcctggccatagctggagatgtttcttttactggcaaaggaagaaggaggcagtaaaggaacagggcagcccgcatgtcttccagaagtgaacagaggccgcagctaccaccgtcacaaagttcactcatctctgggtcccggtgaccccatccccccataccctccatcctgggtcctggggccccaaagctctgaggcctaggagactgcgctgtctcgtggtttgcctactcctacacctttgtaaagagtctcttcattaaaacccctcttcataaaaaaaaaaaaaaaaaactcga

SEQ ID NO: 293 - DNA, 1598 bp, Homo sapiens
  misc_feature (1067)..(1067): n equals a,t,g, or c
  misc_feature (1069)..(1069): n equals a,t,g, or c
  misc_feature (1577)..(1577): n equals a,t,g, or c
aggaaagaacaaaggttatttcctggagaaaagacaatttattcaacaccaacragggactcatcatatgggcacaactctggtgtccttctatggagaaaacctcaagtaaagttttattctgcctttraaaatgcttccaaaagtagaccctgtccccacacaggtcaagactacagagaaggctttgtagaaatgtgtcacctatgtacacctgctacttacacatttcctcttttggaaaaatgagatacttagaataacargaaaattaagacatactggcctggtgccagcagatggcttttctatagacaaactaggttagtgtggaagatataggttaaaataaactatgctgttttatttatcttcccaacctgattggcagctagacttttttagggtctcatttaatggccctgtttttttcattattatatttaatgatagggcaggatttcgtatgcaagctcttgtttctcaggctgcctgcagaagaagtcgctataaattatctgttgtctacatggtacaaggcccattgactcatctgatgcttgttttgttaatttctttaatatttttatcacggggcagtgggagggcttgggcttttagccacagctgttttaagacttctgatctcctgccctgcaggaataggtgggaagtcattgaatttttacactatagtaatttgcattcccacataagtttgagtgttacgaaaacattcctttaaagggatctgtgctacacaaaatatgccaggacctcacagacaaagccattgctagaaatgtcattccaatgatcagatctggaaacaggctgccataaccacttttccttcttgtagactcagctcacctgtatatttaaactgttcttggcatcttgaaacacctatttctactcaggtactcattgtcctgttactgattcacctttctgatccttttcaaccagttttcccccaaggggggaaattttacttaacctctagtatttgaacaactcaatatttgaattgttgccccatttgcttttacctgtactgtatncntggtcatctcaaatggcgtctaaacccagctactttgcattccagaagtttccattccctccaattccacctaatttttcatctgtcctagttactggctctttcttcatgtcttatttctcttgctttgggagcttaaaagattttacaagacctaattttgggttccttccttggagccatagttaccctgccaagaagagtagaaaatgggttcaactcctgtttcgctccaccaacacctctgtgagtctcatcatcagctgagcgatgatgccttacaggttgcatagcactggaactttcctagagtaacggctctgctgccagggtttctctgggctcattcttccactgacttaattatgatctatgcctaacagagccccagtacaactattttgcagaatggctgttaccctagaattactatagcacatattgagatatagttgtactccctagtagataggaactgaccccaacaataaactttgataataaaganaaaaaaaaaaaaaactcgtag

SEQ ID NO: 294 - DNA, 530 bp, Homo sapiens
  misc_feature (517)..(517): n equals a,t,g, or c
gcctggcagagagactctgaaatgagggattagaggtgttcaaggagcaagagcttcagcctgaagacaagggagcagtccctgaagacgcttctactgagaggtctgccatggcctctcttggcctccaacttgtgggctacatcctaggccttctggggcttttgggcacactggttgccatgctgctccccagctggaaaacaagttcttatgtcggtgccagcattgtgacagcagttggcttctccaagggcctctggatggaatgtgccacacacagcacaggcatcacccagtgtgacatctatagcacccttctgggcctgcccgctgacatccaggctgcccaggccatgatggtgacatccagtgcaatctcctccctggcctgcattatctctgtggtgggcatgagatgcacagtcttctgccaggaatcccgagccaaagacagagtggcggtagcaggtggagtctttttcatccttggaagcctcctgggattcattcctgntgcctggaatctt

SEQ ID NO: 295 - DNA, 1046 bp, Homo sapiens
  misc_feature (14)..(14): n equals a,t,g, or c
  misc_feature (33)..(33): n equals a,t,g, or c
  misc_feature (441)..(441): n equals a,t,g, or c
  misc_feature (460)..(460): n equals a,t,g, or c
gagaagtcagcctngcagagagactctgaaatnagggattagaggtgttcaaggagcaagagcttcagcctgcaagacaagggagcagtccctgaagacgcttctactcaccactggtgcctgacagcatgaaatttgagattggagaggctctttacttgggcattatttcttccctgttctccctgatakctggaatcatcctctgcttttcctgctcatsccagagaaatcgctccaactactacgatgcctaccaagcccaacctcttgccacaaggagctctccaaggcctggtcaacctcccaaagtcaagagtgagttcaattcctacagcytgacagggtatgtgtgaagaaccaggggccagarctgggggktggctgggtctgtgaaaaacagtggacagcaccccgaggccacaggtgagggacattacnactggatcgtgtcagaagntgctgctgaggatagactgactttggccattggattgagcaaaggcagaaatgggggctagtgtaacagcatgcaggttgaattgccaaggatgctcgccatgccagcctttctgttttcctcaccttgctgstcccctgccctaagtccccaaccctcaacttgaaaccccattcccttaagccaggactcagaggatccctttgccctctggtttacctgggactccatccccaaacccactaatcacatcccactgactgaccctctgtgatcaaagaccctctctctggctgaggttggctcttagctcattgctggggatgggaaggagaagcagtggcttttgtgggcattgctctaacctacttctcaagcttccctccaaagaaactgattggccctggaacctccatcccactcttgttatgactccacagtgtccagactaatttgtgcatgaactgaaataaaaccatcctacggtatccagggaacagaaagcaggatgcaggatgggaggacaggaaggcagcctgggacatttaaaaaaaaaaaaaaaaaaactcgagggggggcccggtac

SEQ ID NO: 296 - DNA, 819 bp, Homo sapiens
  misc_feature (786)..(786): n equals a,t,g, or c
  misc_feature (819)..(819): n equals a,t,g, or c
aattcggcacgagctcaaagagtaagaatccaagtgtgtgacattacatagctttgcatctatggaaacctaaatcataattgtttccactgcccaattatgttccttttcataacatttactattctggctatatttatcatagaacctaggaaccttagagttgacctgaatctaattaaatttcagacctcctggccaaagaccctagtggaagagcaaaactaaatcaacatattaccaatctcaagtatttctctgaggacccagaccactgactttttgttgtcattttcaggttgatcctataactgtatgttctacaatatctgtgctccaccagctcagtgaggaatcaacggaatatcaaaagtaaatattggtcaccatataccttttggtactagtctacgaaataattggctgaggaactgtttcatattaaagaaaagctaaaagcaatgtgtgatcttagattagacctatgattggaatgtatgtatattttatatacaaaatattgaggaaattgacaaaatttaaatacagaatatggattagataataggaatgtatcaaggtcaatatttaaaaagataatttcaacttttattttattcagtgggtacatgtgcagactttgttttacatagtacccaacagtttttcaacgcttatcccccaccctctagtaatctgcagwgwctattattgycatcttcgtggctattgtacatgggatccatacttgattttgctctcaacatgaacattattggtgtaganaaatgccactaagttttkgtacgttggcttttn

SEQ ID NO: 297 - DNA, 501 bp, Homo sapiens
  misc_feature (1)..(2): n equals a,t,g, or c
  misc_feature (12)..(12): n equals a,t,g, or c
nnccccccaatnatatttttccaaattaattccaacataggaaggattccaccttcctagtatgttttcaaattgtttcaaacctgacctctttttgattgctctaccttccaaaagaaaagaagggaacactaattttcttycctgatttacttcattgttttcttctgttagattaactttacctataaaagattgtctcttgactttatatatatatatatgtgtgtgtgtgtgtgtgtgtgtgtgtgtgtgtgtgtgtgtgtgtatttgaagaggacatgtgcctccataaaaggaaataaaatgagagaatacattattgattttgtgaaatcaaaatatttgaattatggtttctcaatattcaaaaactcttgcagtttctgtacttatttcttctgatgcatagagtttcggggactacatatgtttcacaaccaaagatatccacttgaaataaaaacattataaagttaaaaaaaaaaaaaaaaactcgag

SEQ ID NO: 298 - DNA, 3306 bp, Homo sapiens
ccacgcgtccggcccagggctgtctgtctccaaagcccaaccataactcacatccccattccagctcctctgggtgagtctgttccccctcagcctcactttccttatcctgtcaaatgaaggatttggaatgacttaagttattcaagcaacaaacacttactgaattgtcttgccacttccagggtgacattatggagttctgtgattctgcaagaggccagaggggacaaggtcaagtgggtgttcacctggcccctcatcttcctcctgtgcgtcaccattcccaactgcagcaagccccgctgggagaagttcttcatggtcaccttcatcaacgccacgctgtggatcgctgtgttctcctacatcatggtgtggctggtgactattatcggatacacacttgggatcccggatgtcatcatgggcattactttcctggcagcaggacaagtgttccagactgcatggccagcctaattgtggcgagacaaggccttggggacatggcagtctccaacaccatagaagcaacgtgtttgacatcctggtaggacttggtgtaccgtggggcctgcagaccatggttgttaattatggatcaacagtgaagatcaacagccgggggctggtctattccgtggtcctgttgctgggctctgtcgctctcaccgtcctcggcatccacctaaacaagtggcgactggaccggaagctgggtgtctacgtgctggttctctacgccatcttcttgtgcttctccataatgatagagtttaacgtctttaccttcgtcaacttgccgatgtgccgggaagacgattagcgctgagtcgcggcccctgggagctgatctggacaccctgtgacactggcgtcctcctctcccctccttcccccaccacaggtctctcctgcataggcagccactgtccgttctttcacacactggaaggaagagccatcgtggtctttgtctggccacagccaagctgctgggcatcctcctcctccttggagttccacccctgcaaggctggatttgggggccattatctgagcagcttcaaagacccctgagctgccaaccacggagatgtgccaagcatctcatctctcctgcacactttagtcagaaggacttctgcatgcagtttgtctttctgttctgcaggcagcttcagaattgaggtcatttgtgagcacaagatctcatagggcaggtgcaaaataggaatgttgttctcaagtgtcacctccagcccagaggtggttccttaggcagcatgtgctcctgggagcctctgacttttgctggaagcacccacagtttggaaggggcaagacctcaacctgttggggtttagggcccatgatggcagacattctaccccttttcctggaaaaactggaagaatgaaaataatttttttctgtggaagagagaaaatgagtgaatattcttctcacttttattgatgcattcagagaataagcaatgaaatattaaaaaatgaaacatcatataggtcatcatacttgaaaattatcattccatatgaaaggatcatgatacacaccaaaaaagtaatgatcgtaaagacacaaatcctctgtatgccatcttgcattggcactgaggtgtttggtttggaatagggaaaaagagacaggatctcgctgtgttccccaggtaggtcttgaactcctggcctcaagtgatcctcctgccttgacctcccaaagtgctggattacaagcgtgagcccctgcacccggcccaagcagttgcttctttttttctctttttttttttttttgagatggagcctcactctgttgcccaggctggagtgcagtggcgcgatctccactcactgcaagctccgcctcccgggttcatgccattctcctgcctcagcctcccgagtagctgggactacaggcgcctgccaccacacccagctaattttttgtatttttggtacagacagggtttcaccgtgttagccaggatggtcttgatctctgatctcggatccgccaccccggcctccaaagtgctggattacaagcgtgagccaccgggccccgccaagcagttgcttcttatgcaacatgttgggtgggacttgtccacgggccaggccaataaaattcttaatcctgcagagagcagtaccctcatcaccccatcactggaaaacaaatgtttaagctatcaagagagggaatgtgcagcttggttctagatgcatggtttggaggatctaccttggcctaaagggaatgtcccaaacaacagagccttctttgctgcactccagaattctctacacagaatttcccaagtccattcaggacagacgcgcagtcctctttcaatggaagaagagaggacttttcccctcctgaaaaatgactggagtgtgaacaaggcagctctgtttttctaaataagttgttcttgtgagttttttctggccactgggcatctctgccctcacttttcatccctgccctctaagctgcagaccccatgaccacactgtctgcttccttgagcttcccgcacgaggcttgcacctgggggacctggagaccctgcggacagaactgtggctgagccactgtggccaactcttggggagctccacagtgggggttgctggtctgtgaggctgagtctccatttcagagcacacactccctggcagggcgcctccgcctgtgtctcctgcccagcagccgccagcagggaatagttgctggtgtctgagcacaaagagagctttgattacctagagaggaaaaaggctgtcagccagatgcagccaggcccaggggtagatacaggagttgctaaggaaggggccgagccaggagaggccaggcagatccacaaagcccaaggggatgcaggctgggtgtggtttctgagggaacctaccaaatagcaggtagatggaatcagaggactcttgtgtcctgaaagaacctccttaaaaacaactaaaaccaagaacttctggggctgttcacacattgttcaagtcaccccaagatcgttctggcacgctgagctgaacaccaccatctttgttcattctctctctaatgggcaaagcaggatcatcgagttgaaaagttgtaaataatgaggatatttatcccgctatttattttttcaataactgtgacctcctgcactgtgaatgctctgtgacatgagattcttagtttaataaaactgtcattaaatttgaaaaaaaaaaaaaaaaaaaaaaaaaaaaaaaaaaaaaa

SEQ ID NO: 299 - DNA, 2194 bp, Homo sapiens
  misc_feature (441)..(441): n equals a,t,g, or c
  misc_feature (987)..(987): n equals a,t,g, or c
  misc_feature (2034)..(2034): n equals a,t,g, or c
  misc_feature (2041)..(2041): n equals a,t,g, or c
  misc_feature (2121)..(2121): n equals a,t,g, or c
  misc_feature (2169)..(2169): n equals a,t,g, or c
  misc_feature (2184)..(2184): n equals a,t,g, or c
ggcccagggctgtctgtctccaaagcccaaccataactcacatccccattccagctcctctgggtgagtctgttccccctcagcctcactttccttatcctgtcaaatgaaggatttggaatgacttaagttattcaagcaacaaacacttactgaattgtcttgccacttccagggtgacattatggagttctgtgattctgcaagaggccagaggggacaaggtcaagtgggtgttcacctggcccctcatcttcctcctgtgcgtcaccattcccaactgcagcaagccccgctgggagaagttcttcatggtcaccttcatcamcgccacgctgtggatcgctgtgttctcctacatcatggtgtggctggtgactattatcggatacacacttgggatcccggatgtcatcatgggcattamtttcctggcagcanggacaagtgttccagactgcatggccagcctaattgtggcgagacaaggccttggggacatggcagtctccaacacyataaraagcaacgtgtttgacatcctggtaggacttggtgtaccgtggggcctgcagaccatggttgttaattatggatcaacagtgaagatcaacagccgggggctggtctattccgtggtcctgttgctgggctctgtcgctctcaccgtcctcggcatccacctaaacaagtggcgactggaccggaagctgggtgtctacgtgctggttctctacgccatcttcttgtgcttctccataatgatagagtttaacgtctttaccttcgtcaacttgccgatgtgccgggaagacgattagcgctgagtcgcggcccctgggagctgatctggacaccctgtgacactggcgtcctcctctcccctccttcccccaccacaggtctctcctgcataggcagccactgtccgttctttcacacactggaaggaagagccatcgtggtctttgtctggccacaggccangctgctgggcatcctcctcctccttggagttccacccctgsaaggcygatttgggggccattatctgagcagcttcaaagacccctgarctgccaaccacggagatgtgccaagcatctcatctctcctgcacactttagtcagaaggacttctgcatgcagtttgtctttctgttctgcaggcagcttcagaattgaggtcatttgtgagcacaagatctcatagggcaggtgcaaaataggaatgttgttctcaagtgtcacctccagcccagaggtggttccttaggcagcatgtgctcctgggagcctctgacttttgctggaagcacccacagtttggaaggggcaagacctcaacctgttggggtttagggcccatgatggcagacattctaccccttttcctggaaaaactggaagaatgaaaatmatttttttctgtggaagagagaaaatgagtgaatatycttctcacttttattgatgcattcagagaataagcaatgaaatattaaaaaatgaaacatcatataggtcatcatacttgaaaattatcattccatatgaaaggatcatgatacacaccaaaaaagtaatgatcgtaaagacacaaatcctctgtatgccatcttgcattggcactgaggtgtttggtttggaatagggaaaaagagacaggatctcgctgtgttccccaggtaggtcttgaactcctggcctcaagtgatcctcctgccttgacctcccaaagtgctggattacaagcgtgagcccctgcacccggcgccaagcagttgcttctttttttctctttttttttttttttgagatggagcctcactctgttgcccaggctggagtgcagtggcgcgatctccactcactgcaagctccgcctcccgggttcatgccattctcctgcctcagcctcccgagtagctgggactacaggcgcctgccaccacacccagctaattttttgtatttttggtacagacagggtttcaccgtgttagccaggatggtcttgatctctgatctcgngatccgnccaccccggccttccaaagtgcttggattacaagcgtgagccacccgggccccgccaagcaagttgcttcttatgcaacnatgttgggttggggacttggtccacggggcccaggcccaataaaaatnctttaatccctgcanaagaggccag

SEQ ID NO: 300 - protein, 207 aa, Homo sapiens
MIKHVAWLIFTNCIFFCPVAFFSFAPLITAISISPEIMKSVTLIFFPLPACLNPVLYVFFNPKFKEDWKLLKRRVTKKSGSVSVSISSQGGCLEQDFYYDCGMYSHLQGNLTVCDCCESFLLTKPVSCKHLIKSHSCPALAVASCQRPEGYWSDCGTQSAHSDYADEEDSFVSDSSDQVQACGRACFYQSRGFPLVRYAYNLPRVKD

SEQ ID NO: 301 - protein, 114 aa, Homo sapiens
  SITE (13): Xaa equals any amino acid
MAGPRASTGPRPXCLVLFLFNFIFCFMSVCPPTPTPFSVKWGALGESLLPPSLSQDLPPRHQPSLWTRQRADRVGRGLRVARASPPANGPLLRPPVSPCPFLKQNALVCKPLDA

SEQ ID NO: 302 - protein, 49 aa, Homo sapiens
MRLCSFTKVPMNLFLNVILLKFYNFLFSLILGKSCLASLGLCKNNKCLS

SEQ ID NO: 303 - protein, 62 aa, Homo sapiens
  SITE (16): Xaa equals any amino acid
  SITE (54): Xaa equals any amino acid
MVTGFFFILMTVLWFXREPGFVPGWDSFFEKKGYRTDATVSVFLGFLLFLIPAXEALLWEKE

SEQ ID NO: 304 - protein, 122 aa, Homo sapiens
MCYLLLLLIQTAELLIHPQGLQAVSNGESALKGTRPTFSSPFILVTEGRKEWEGVFLSSGWKGNTLSNYYISLVFYYSRILQPYFYCLWGKLEMVTLIRSVWRGINGGDKIQLVLENVKVLK

SEQ ID NO: 305 - protein, 563 aa, Homo sapiens
MWAVLRLALRPCARASPAGPRAYHGDSVASLGTQPDLGSALYQENYKQMKALVNQLHERVEHIKLGGGEKARALHISRGKLLPRERIDNLIDPGSPFLELSQFAGYQLYDNEEVPGGGIITGIGRVSGVECMIIANDATVKGGAYYPVTVKKQLRAQEIAMQNRLPCIYLVDSGGAYLPRQADVFPDRDHFGRTFYNQAIMSSKNIAQIAVVMGSCTAGGAYVPAMADENIIVRKQGTIFLAGPPLVKAATGEEVSAEDLGGADLHCRKSGVSDHWALDDHHALHLTRKVVRNLNYQKKLDVTIEPSEEPLFPADELYGIVGANLKRSFDVREVIARIVDGSRFTEFKAFYGDTLVTGFARIFGYPVGIVGNNGVLFSESAKKGTHFVQLCCQRNIPLLFLQNITGFMVGREYEAEGIAKDGAKMVAAVACAQVPKITLIIGGSYGAGNYGMCGRAYSPRFLYIWPNARISVMGGEQAANVLATITKDQRAREGKQFSSADEAALKEPIIKKFEEEGNPYYSSARVWDDGIIDPADTRLVLGLSFSAALNAPIEKTDFGIFRM

SEQ ID NO: 306 - protein, 53 aa, Homo sapiens
MVQFEVIFLLFGLCFSSSSSRLVGSQVENFSPTPCIFQAFRCSSLAIISMSLS

SEQ ID NO: 307 - protein, 421 aa, Homo sapiens
MTVFFKTLRNHWKKTTAGLCLLTWGGHWLYGKHCDNLLRRAACQEAQVFGNQLIPPNAQVKKATVFSILQLAKEKPGLYLKKMLPDFTFIWHGCDYCKTDYEGQAKKLLELMENTDVIIVAGGDGTLQEVVTGVLRRTDEATFSKIPIGFIPLGETSSLSHTLFAESGNKVQHITDATLAIVKGETVPLDVLQIKGEKEQPVFAMTGLRWGSFRDAGVKVSKYWYLGPLKIKAAHFFSTLKEWPQTHQASISYTGPTERPPNEPEETPVQRPSLYRRILRRLASYWAQPQDALSQEVSPEVWKDVQLSTIELSITTRNNQLDPTSKEDFLNICIEPDTISKGDFITIGSRKVRNPKLHVEGTECLQASQCTLLIPEGAGGSFSIDSEEYEAMPVEVKLLPRKLQFFCDPRKREQMLTSPTQ

SEQ ID NO: 308 - protein, 242 aa, Homo sapiens [sequence omitted]

SEQ ID NO: 309 - protein, 189 aa, Homo sapiens
  SITE (94): Xaa equals any amino acid
MALLSRPALTLLLLLMAAVVRCQEQAQTTDWRATLKTIRNGVHKIDTYLNAALDLLGGEDGLCQYKCSDGSKPFPRYGYKPSPPNGCGSPLFGXHLNIGIPSLTKCCNQHDRCYETCGKSKNDCDEEFQYCLSKICRDVQKTLGLTQHVQACETTVELLFDSVIHLGCKPYLDSQRAACRCHYEEKTDL

SEQ ID NO: 310 - protein, 64 aa, Homo sapiens
MPLFLFVAHLISLLLAFRRPPASQITPRAWTTEIASCESVEMVKALSSLRSRAQVNADFPGHLC

SEQ ID NO: 311 - protein, 49 aa, Homo sapiens
MNLLGMIFSMCGLMLKLKWCAWVAVYCSFISFANSRSSEDTKQMMSSFM

SEQ ID NO: 312 - protein, 59 aa, Homo sapiens
MNSTLCVVLSLMCMNSTLCVVLSLTHSCPSPQVPKVHYMIFMPLHLHSLALTQLIIIYK

SEQ ID NO: 313 - protein, 240 aa, Homo sapiens
MGNCQAGHNLHLCLAHHPPLVCATLILLLLGLSGLGLGSFLLTHRTGLRSPDIPQDWVSFLRSFGQLTLCPRNGTVTGKWRGSHVVGLLTTLNFGDGPDRNKTRTFQATVLGSQMGLKGSSAGQLVLITARVTTERTAGTCLYFSAVPGILPSSQPPISCSEEGAGNATLSPRMGEECVSVWSHEGLVLTKLLTSEELALCGSRLLVLGSFLLLFCGLLCCVTAMCFHPRRESHWSRTRL

SEQ ID NO: 314 - protein, 39 aa, Homo sapiens
MLLLLKTLFVTFWSTNLSITFSNYNVKLYQWQSYIVNGS

SEQ ID NO: 315 - protein, 174 aa, Homo sapiens [sequence omitted]

SEQ ID NO: 316 - protein, 61 aa, Homo sapiens
MYLFLKTLLSFSTLMMTTALSFMVITVLWVLLLHLLANICIPRKCSFACFYINGILLHAVF

SEQ ID NO: 317 - protein, 319 aa, Homo sapiens
MSWCCLWLCLSSVGRTGSAGPSLPFSELCSLGLLRLRPVFSPLHSGPGKPAQFLAGEAEEVNAFALGFLSTSSGVSGEDEVEPLHDGVEEAEKKMEEEGVSVSEMEATGAQGPSRVEEAEGHTEVTEAEGSQGTAEADGPGASSGDEDASGRAASPESASSTPESLQARRHHQFLEPAPAPGAAVLSSEPAEPLLVRHPPRPRTTGPRPRQDPHKAGLSHYVKLFSFYAKMPMERKALEMVEKCLDKYFQHLCDDLEVFAAHAGRKTVKPEDLELLMRRQGLVTDQVSLHVLVERHLPLEYRQLLIPCAYSGNSVFPAQ

SEQ ID NO: 318 - protein, 336 aa, Homo sapiens [sequence omitted]

SEQ ID NO: 319 - protein, 272 aa, Homo sapiens
MWGNKFGVLLFLYSVLLTKGIENIKNEIEDASEPLIDPVYGHGSQSLINLLLTGHAVSNVWDGDRECSGMKLLGIHEQAAVGFLTLMEALRYCKVGSYLKSPKFPIWIVGSETHLTVFFAKDMALVAPEAPSEQARRVFQTYDPEDNGFIPDSLLEDVMKALDLVSDPEYINLMKNKLDPEGLGIILLGPFLQEFFPDQGSSGPESFTVYHYNGLKQSNYNEKVMYVEGTAVVMGFEDPMLQTDDTPIKRCLQTKWPYIELLWTTDRSPSLN

SEQ ID NO: 320 - protein, 89 aa, Homo sapiens
MFKDYPPAIKPSYDVLLLLLLLVLLLQAGLNTGTAIQCVRFKVSARLQGASWDTQNGPQERLAGEVARSPLKEFDKEKAWRAVVVQMAQ

SEQ ID NO: 321 - protein, 51 aa, Homo sapiens
  SITE (23): Xaa equals any amino acid
MAQHHLLSILLAILSCSSQPRQXRGSGALPCEVCSAVLLTCLRKISGSLCV

SEQ ID NO: 322 - protein, 74 aa, Homo sapiens
MLHLAAMWWACVTTLVFTLVSKLFIPLKSSMDGEMSLDPHSCVLVCICFPLRFVFVSCFELYLVQSIVKLSQQL

SEQ ID NO: 323 - protein, 127 aa, Homo sapiens [sequence omitted]

SEQ ID NO: 324 - protein, 215 aa, Homo sapiens
  SITE (83): Xaa equals any amino acid
  SITE (141): Xaa equals any amino acid
MYGKSSTRAVLLLLGIQLTALWPIAAVEIYTSRVLEAVNGTDARLKCTFSSFAPVGDALTVTWNFRPLDGGPEQFVFYYHIDXFQPMSGRFKDRVSWDGNPERYDASILLWKLQFDDNGTYTCQVKNPPDVDGVIGDIRLXVVHTVRFSEIHFLALAIGSACALMIIIVIVVVLFQHYRKKRWAERAHKVVEIKSKEEERLNQEKKVSVYLEDTD

SEQ ID NO: 325 - protein, 47 aa, Homo sapiens
MFYPPCPFFPQLCFCIFFLGKCKLSLSFMTCEISVSLEFVRRRGNHA

SEQ ID NO: 326 - protein, 100 aa, Homo sapiens
  SITE (36): Xaa equals any amino acid
  SITE (47): Xaa equals any amino acid
  SITE (51): Xaa equals any amino acid
  SITE (83): Xaa equals any amino acid
MGMILVLASFLAHPVEALAQAVALGQQQLALLGVQXHAVEGFLQLQXCFAXLFVFEGALLAHLGHFFVEPGAAQGQLLDLGLXRRELGFQFALLARFVLQ

SEQ ID NO: 327 - protein, 40 aa, Homo sapiens
MIILHIVVCLFTISIIEEQKEEILCSTKSQAEKTVTHIEQ

SEQ ID NO: 328 - protein, 108 aa, Homo sapiens
  SITE (62): Xaa equals any amino acid
  SITE (63): Xaa equals any amino acid
MGAAKVWGEVGRWLVIALIQLAKAVLRMLLLLWFKAGLQTSPPIVPLDRETRHSPRMVTTAXXTMSSPTWGSGQTGWCEPSRTRRPCTPGTGELPSSGRDGSSSITRS

SEQ ID NO: 329 - protein, 941 aa, Homo sapiens [sequence omitted]

SEQ ID NO: 330 - protein, 267 aa, Homo sapiens
  SITE (172): Xaa equals any amino acid
  SITE (175): Xaa equals any amino acid
MSEIRGKPIESSCMYGTCCLWGKTYSIGFLRFCKQATLQFCVVKPLMAVSTVVLQAFGKYRDGDFDVTSGYLYVTIIYNISVSLALYALFLFYFATRELLSPYSPVLKFFMVKSVIFLSFWQGMLLAILEKCGAIPKIHSARVSVGEGTVAAGYQDFIICVEMFFAALALRXAFXYKVYADKRLDAQGRCAPMKSISSSLKETMNPHDIVQDAIHNFSPAYQQYTQQSTLEPGPTWRGGAHGLSRSHSLSGARDNEKTLLLSSDDEF

SEQ ID NO: 331 - protein, 53 aa, Homo sapiens
MLVLMTTCILAAVCVHTAQCAPDSRMDNDCPSHQAQIHFRASEVRRGWTFNHD

SEQ ID NO: 332 - protein, 52 aa, Homo sapiens [sequence omitted]

SEQ ID NO: 333 - protein, 87 aa, Homo sapiens
MGLHLRPYRVGLLPDGLLFLLLLLMLLADPALPAGRHPPVVLVPGDLGNQLEAKLDKPTVVHYLCSKKTESYFTIWLNLELLLPVHH

SEQ ID NO: 334 - protein, 40 aa, Homo sapiens
MGPSQREVTVQWHRALFLLPLLLLSTRTETKNFGFKWLKD

SEQ ID NO: 335 - protein, 525 aa, Homo sapiens
  SITE (210): Xaa equals any amino acid
MLAFPLLLTGLISFREKRLQDVGTPAARARAFFTAPVVVFHLNILSYFAFLCLFAYVLMVDFQPVPSWCECAIYLWLFSLVCEEMRQLFYDPDECGLMKKAALYFSDFWNKLDVGAILLFVAGLTCRLIPATLYPGRVILSLDFILFCLRLMHIFTISKTLGPKIIIVKRMMKDVFFFLFLLAVWVVSFGVAKQAILIHNERRVDWLFRXAVYHSYLTIFGQIPGYIDGVNFNPEHCSPNGTDPYKPKCPESDATQQRPAFPEWLTVLLLCLYLLFTNILLLNLLIAMFNYTFQQVQEHTDQIWKFQRHDLIEEYHGRPAAPPPFILLSHLQLFIKRVVLKTPAKRHKQLKNKLEKNEEAALLSWEIYLKENYLQNRQFQQKQRPEQKIEDISNKVDAMVDLLDLDPLKRSGSMEQRLASLEEQVAQTARALHWIVRTLRASGFSSEADVPTLASQKAAEEPDAEPGGRKKTEEPGDSYHVNARHLLYPNCPVTRFPVPNEKVPWETEFLIYDPPFYTAERKDAA

SEQ ID NO: 336 - protein, 937 aa, Homo sapiens
MQNSGKTKFKRTSIDRLMNTLVLWIFGFLICLGIILAIGNSIWESQTGDQFRTFLFWNEGEKSSVFSGFLTFWSYIIILNTVVPISLYVSVEVIRLGHSYFINWDRKMYYSRKAIPAVARTTTLNEELGQIEYIFSDKTGTLTQNIMTFKRCSINGRIYGEVHDDLDQKTEITQEKEPVDFSVKSQADREFQFFDHNLMESIKMGDPKVHEFLRLLALCHTVMSEENSAGELIYQVQSPDEGALVTAARNFGFIFKSRTPETITIEELGTLVTYQLLAFLDFNNTRKRMSVIVRNPEGQIKLYSKGADTILFEKLHPSNEVLLSLTSDHLSEFAGEGLRTLAIAYRDLDDKYFKEWHKMLEDANVATEERDERIAGLYEEIERDLMLLGATAVEDKLQEGVIETVTSLSLANIKIWVLTGDKQETAINIGYACNMLTDDMNDVFVIAGNNAVEVREELRKAKQNLFGQNRNFSNGHVVCEKKQQLELDSIVEETITGDYALIINGHSLAHALESDVKNDLLELACMCKTVICCRVTPLQKAQVVELVKKYRNAVTLAIGDGANDVSMIKSAHIGVGISGQEGLQAVLASDYSFAQFRYLQRLLLVHGRWSYFRMCKFLCYFFYKNFAFTLVHFWFGFFCGFSAQTVYDQWFITLFNIVYTSLPVLAMGIFDQDVSDQNSVDCPQLYKPGQLNLLFNKRKFFICVMHGIYTSLVLFFIPYGAFYNVAGEDGQHIADYQSFAVTMATSLVIVVSVQIALDTSYWTFINHVFIWGSIAIYFSILFTMHSNGIFGIFPNQFPFVGNARHSLTQKCIWLVILLTTVASVMPVVAFRFLKVDLYPTLSDQIRRWQKAQKKARPPSSRRPRTRRSSSRRSGYAFAHQEGYGELITSGKNMRAKNPPPTSGLEKTHYNSTSWIENLCKKTTDTVSSFSQDKTVKL

SEQ ID NO: 337 - protein, 122 aa, Homo sapiens
MIGGITCILSLICALALAYLDQRAERILHKEQGKTGEVIKLTDVKDFSLPLWLIFIICVCYYVAVFPFIGLGKVFFTEKFGFSSQAASAINSVVYVISAPMSPVFGLLVDKTGKNIIWVLCA

SEQ ID NO: 338 - protein, 46 aa, Homo sapiens
MPWLKSLLHFSLFLVVFSTLAVKSLGVPVAAGSPFCIVDVLHFILL

SEQ ID NO: 339 - protein, 66 aa, Homo sapiens
MSWVIVVIIWGYLLEGHGVPFCKSYGPSPWKLHTHHAAYNSGSSQVYRILETLMSGSTHCSFSGTF

SEQ ID NO: 340 - protein, 90 aa, Homo sapiens
MPRAPWRIPLCALPTLCLGSPLPSQPTHPIFYDHRAPTWKMAHPGGPRSSHSPRTWRTPSSQTKAALPAGGARNSPLQLCTRSRFCGTPM

SEQ ID NO: 341 - protein, 710 aa, Homo sapiens
MPVPWFLLSLALGRSPVVLSLERLVGPQDATHCSPGLSCRLWDSDILCLPGDIVPAPGPVLAPTHLQTELVLRCQKETDCDLCLRVAVHLAVHGHWEEPEDEEKFGGAADLGVEEPRNASLQAQVVLSFQAYPTARCVLLEVQVPAALVQFGQSVGSVVYDCFEAALGSEVRIWSYTQPRYEKELNHTQQLPDCRGLEVWNSIPSCWALPWLNVSADGDNVHFGLSLYWNQVQGPPKPRWHKNLTGPQIITLNHTDLVPCLCIQVWPLEPDSVRTNICPFREDPRAHQNLWQAARLRLLTLQSWLLDAPCSLPAEAALCWRAPGGDPCQPLVPPLSWENVTVDKVLEFPLLKGHPNLCVQVNSSEKLQLQECLWADSLGPLKDDVLLLETRGPQDNRSLCALEPSGCTSLPSKASTRAARLGEYLLQDLQSGQCLQLWDDDLGALWACPMDKYIHKRWALVWLACLLFAAALSLILLLKKDHAKGWLRLLKQDVRSGAAARGRAALLLYSADDSGFERLVGALASALCQLPLRVAVDLWSRRELSAQGPVAWFHAQRRQTLQEGGVVVLLFSPGAVALCSEWLQDGVSGPGAHGPHDAFRASLSCVLPDFLQGRAPGSYVGACFDRLLHPDAVPALFRTVPVFTLPSQLPDFLGALQQPRAPRSGRLQERAEQVSRALQPALDSYFHPPGTPAPGRGVGPGAGPGAGDGT

SEQ ID NO: 342 - protein, 48 aa, Homo sapiens [sequence omitted]

SEQ ID NO: 343 - protein, 467 aa, Homo sapiens
MLLLLLLPLLWGRERVEGQKSNRKDYSLTMQSSVTVQEGMCVHVRCSFSYPVDSQTDSDPVHGYWFRAGNDISWKAPVATNNPAWAVQEETRDRFHLLGDPQTKNCTLSIRDARMSDAGRYFFRMEKGNIKWNYKYDQLSVNVTALTHRPNILIPGTLESGCFQNLTCSVPWACEQGTPPMISWMGTSVSPLHPSTTRSSVLTLIPQPQHHGTSLTCQVTLPGAGVTTNRTIQLNVSYPPQNLTVTVFQGEGTASTALGNSSSLSVLEGQSLRLVCAVDSNPPARLSWTWRSLTLYPSQPSNPLVLELQVHLGDEGEFTCRAQNSLGSQHVSLNLSLQQEYTGKMRPVSGVLLGAVGGAGATALVFLSFCVIFIVVRSCRKKSARPAADVGDIGMKDANTIRGSASQGNLTESWADDNPRHHGLAAHSSGEEREIQYAPLSFHKGEPQDLSGQEATNNEYSEIKIPK

SEQ ID NO: 344 - protein, 98 aa, Homo sapiens
MHCCQLPWRCAQAPQEAFLLCLLFLILVLVLLGCSRGLPGHTPWRLHPAAAALLAPLLHDALGACGFQGPEYLLPCLLPLPKPGQLQGPWGPLWALLP

SEQ ID NO: 345 - protein, 365 aa, Homo sapiens
MFVGLMAFLLSFYLIFTNEGRALKTATSLAEGLSLVVSPDSIHSVAPENEGRLVHIIGALRTSKLLSDPNYGVHLPAVKLRRHVEMYQWVETEESREYTEDGQVKKETRYSYNTEWRSEIINSKNFDREIGHKNPSAMAVESFMATAPFVQIGRFFLSSGLIDKVDNFKSLSLSKLEDPHVDIIRRGDFFYHSENPKYPEVGDLRVSFSYAGLSGDDPDLGPAHVVTVIARQRGDQLVPFSTKSGDTLLLLHHGDFSAEEVFHRELRSNSMKTWGLRAAGWMAMFMGLNLMTRILYTLVDWFPVFRDLVNIGLKAFAFCVATSLTLLTVAAGWLFYRPLWALLIAGLALVPILVARTRVPAKKLE

SEQ ID NO: 346 - protein, 608 aa, Homo sapiens
  SITE (265): Xaa equals any amino acid
  SITE (597): Xaa equals any amino acid
MVGTKLRQTKDALFTILHDLRPQDRFSIIGFSNRIKVWKDHLISVTPDSIRDGKVYIHHMSPTGGTDINGVLQRAIRLLNKYVAHSGIGDRSVSLIVFLTDGKPTVGETHTLKILNNTREAARGQVCIFTIGIGNDVDFRLLEKLSLENCGLTRRVHEEEDAGSQLIGFYDEIRTPLLSDIRIDYPPSSVVQATKTLFPNYFNGSEIIIAGKLVDRKLDHLHVEVTASNSKKFIILKTDVPVRPQKAGKDVTGSPRPGGDGEGDXNHIERLWSYLTTKELLSSWLQSDDEPEKERLRQRAQALAVSYRFLTPFTSMKLRGPVPRMDGLEEAHGMSAAMGPEPVVQSVRGAGTQPGPLLKKPYQPRIKISKTSVDGDPHFVVDFPLSRLTVCFNIDGQPGDILRLVSDHRDSGVTVNGELIGAPAPPNGHKKQRTYLRTITILINKPERSYLEITPSRVILDGGDRLVLPCNQSVVVGSWGLEVSVSANANVTVTIQGSIAFVILIHLYKKPAPFQRHHLGFYIANSEGLSSNCHGLLGQFLNQDARLTEDPAGPSQNLTHPLLLQVGEGPEAVLTVKGHQVPVVWKQRKIYNGEEQXDCWFARNMPPN

SEQ ID NO: 347 - protein, 56 aa, Homo sapiens
MFYKLTLILCELSVAGVTQAASQRPLQRLPRHICSQRSSSWEMPPQGPAPDHVGRA

SEQ ID NO: 348 - protein, 540 aa, Homo sapiens
  SITE (137): Xaa equals any amino acid
MVRTDGHTLSEKRNYQVTNSMFGASRKKFVEGVDSDYHDENMYYSQSSMFPHRSEKDMLASPSTSGQLSQFGASLYGQQSALGLPMRGMSNNTPQLNRSLSQGTQLPSHVTPTTGVPTMSLHTPPSPSRGILPMNPXNMMNHSQVGQGIGIPSRTNSMSSSGLGSPNRSSPSIICMPKQQPSRQPFTVNSMSGFGMNRNQAFGMNNSLSSNIFNGTDGSENVTGLDLSDFPALADRNRREGSGNPTPLINPLAGRAPYVGMVTKPANEQSQDFSIHNEDFPALPGSSYKDPTSSNDDSKSNLNTSGKTTSSTDGPKFPGDKSSTTQNNNQQKKGIQVLPDGRVTNIPQGMVTDQFGMIGLLTFIRAAETDPGMVHLALGSDLTTLGLNLNSPENLYPKFASPWASSPCRPQDIDFHVPSEYLTNIHIRDKLAAIKLGRYGEDLLFYLYYMNGGDVLQLLAAVELFNRDWRYHKEERVWITRAPGMEPTMKTNTYERGTYYFFDCLNWRKVAKEFHLEYDKLEERPHLPSTFNYNPAQQAF

SEQ ID NO: 349 - protein, 99 aa, Homo sapiens
MLFFLSLFLSLLLTLSLPSFLPFSFFFFSLFPHLSACLLPSLPSPPFPLPPSLPSFLPSFLPSFLPSLLSPSFPAFFPSFCQLARRSPRKSTQMLQSTS

SEQ ID NO: 350 - protein, 66 aa, Homo sapiens
MNYIFLLMALPHLIAIALTWGRYSFSCLANKETEFQRCQVTCLLHTLGVLMFNFELRSIWLESSLH

SEQ ID NO: 351 - protein, 72 aa, Homo sapiens
MRHTCIVNIAASLLVANTWFIVVAAIQDNRYILCKTACVAATFFIHFFYLSVFFWMLTLGPHAVLSPGFHSA

SEQ ID NO: 352 - protein, 41 aa, Homo sapiens
MPPKQIPLTSLSLLALLLFFFFKIFCLLFLFYPLPDESEHF

SEQ ID NO: 353 - protein, 47 aa, Homo sapiens
MLISVDSNVPVVFLLLFILVILCHMECKGHIYICVCVCVYMYIFKNI

SEQ ID NO: 354 - protein, 121 aa, Homo sapiens
MHRSEPFLKMSLLILLFLGLAEACTPREVNLLKGIIGLMSRLSPDEILGLLSLQVLHEETSGCKEEVKPFSGTTPSRKPLPKRKNTWNFLKCAYMVMTYLFVSYNKGDWFTFSSQVLLPLL

SEQ ID NO: 355 - protein, 116 aa, Homo sapiens
  SITE (46): Xaa equals any amino acid
MPGGTRCRVLLLSLTFGTSMACGNVGLRLCPWTWHNWLLPPHLCSXWPCRRCCWAAATTHFSWPPWVRSAWGPPAAWLESSGHPLPAVASCSQPPASADSSRFSKVPCCRRRGWTR

SEQ ID NO: 356 - protein, 86 aa, Homo sapiens
MPWHVCFFLSGLLFPSPQTSLQHLCLLTSLILGVTISAYEHAINLPSLQNSLLTSHPSVAALSLLSSSLQQNSLKELLAGHSGSLL

SEQ ID NO: 357 - protein, 10 aa, Homo sapiens
GLLYIMYCNI

SEQ ID NO: 358 - protein, 45 aa, Homo sapiens
MVKWIILSCLILKGKRTLNSSTFYAANKSSTINRNLSWQALPFTH

SEQ ID NO: 359 - protein, 38 aa, Homo sapiens
MLKLATILLTLLLKNLDAGLTDKLSRSNFITDFILTKY

SEQ ID NO: 360 - protein, 44 aa, Homo sapiens
MPCHGLLAQGLSLAPLPPWALCCVGVSRALQDIQQHPRPPAPCQ

SEQ ID NO: 361 - protein, 34 aa, Homo sapiens
MQARWFHILGMMMFIWSSAHQYKCPCYSRQSQEK

SEQ ID NO: 362 - protein, 68 aa, Homo sapiens
MVHNCLLLLKFLLLFCFPLISYQLMNGSLQSLQRLRMIQNVQCIVLNKQEAEFLMGISFQIYDWSLGF

SEQ ID NO: 363 - protein, 162 aa, Homo sapiens [sequence omitted]

SEQ ID NO: 364 - protein, 47 aa, Homo sapiens
MLLFSSRFIMFLWPPVSGVCLSFIRDRSFLPMCHFIYVLILCNSIAL

SEQ ID NO: 365 - protein, 79 aa, Homo sapiens
MTLMCLCLSVTVLHPLRSKERLSGTFCGYSSSWCSPASESSSPGSLLTCAASGSHPDCPLSQRLLGVQLAALGRPQGLF

SEQ ID NO: 366 - protein, 292 aa, Homo sapiens
MLRVLCLLRPWRPLRARGCASDGAAGGSEIQVRALAGPDQGITEILMNRPSARNALGNVFVSELLETLAQLREDRQVRVLLFRSGVKGVFCAGADLKEREQMSEAEVGVFVQRLRGLMNDIAAFPAPTIAAMDGFALGGGLELALACDLRVAASSAVMGLIETTRGLLPGAGGTQRLPRCLGVALAKELIFTGRRLSGTEAHVLGLVNHAVAQNEEGDAAYQRARALAQEILPQAPIAVRLGKVAIDRGTEVDIASGMAIEGMCYAQNIPTRDRLEGMAAFREKRTPKFVGK

SEQ ID NO: 367 - protein, 121 aa, Homo sapiens
MIMAQKIGGLTWWAIMFIILFEITGTSSSFLRINALPHFSMNRCGEAYFPFSYLYTSLQKQFLMKVSGIVKNLRGNDDWRCFGVFFCIHFLMRKVLNVVQVRPNYYLTIIGRFYVSVKVFK

SEQ ID NO: 368 - protein, 50 aa, Homo sapiens
MYIYLIHLCMCVYIYIYILLIIYTLDPEPPSWSPKLDSHLSLRQPSNDRF

SEQ ID NO: 369 - protein, 44 aa, Homo sapiens
  SITE (11): Xaa equals any amino acid
  SITE (34): Xaa equals any amino acid
MVLHCIAWLQXGISFLFLFLCVIAIGATNFASPXFYKLVSSGVA

SEQ ID NO: 370 - protein, 89 aa, Homo sapiens
  SITE (12): Xaa equals any amino acid
  SITE (13): Xaa equals any amino acid
  SITE (72): Xaa equals any amino acid
MSGGLSFLLLVXXGTQSPLHLAGSCPGQTHLSFPLGQDRGQQLQQKQQDLEQEGLEATQGLLAGEWAPPLWXLGSLFQAFVKRESQAYA

SEQ ID NO: 371 - protein, 508 aa, Homo sapiens [sequence omitted]

SEQ ID NO: 372 - protein, 77 aa, Homo sapiens
  SITE (69): Xaa equals any amino acid
MTGQIPRLSKVNLFTLLSLWMELFPAEAQRQKSQKNEEGKHGPLGDNEERTRVSTDKRQDYWEQLRCLXERFTITAG

SEQ ID NO: 373 - protein, 44 aa, Homo sapiens
MRLRNGTVATALAFITSFLTLSWYTTWQNGKGKENDSENVHEMY

SEQ ID NO: 374 - protein, 327 aa, Homo sapiens [sequence omitted]

SEQ ID NO: 375 - protein, 91 aa, Homo sapiens
MGDKLGMARAPSVALAQLWLICLCPESLASFVQAVPWKVLQPSSNRSTDCSPHMRPTCETLGSRKAQDLVLDTMCLSTDDCQGLICRGHRS

SEQ ID NO: 376 - protein, 243 aa, Homo sapiens
MGTLPWLLAFFILGLQAWDTPTIVSRKEWGARPLACRALLTLPVAYIITDQLPGMQCQQQSVCSQMLRGLQSHSVYTIGWCDVAYNFLVGDDGRVYEGVGWNIQGLHTQGYNNISLGIAFFGNKISSSPSPAALSAAEGLISYAIQKGHLSPRYIQPLLLKEETCLDPQHPVMPRKVCPNIIKRSAWEARETHCPKMNLPAKYVIIIHTAGTSCTVSTDCQTVVRNIQSFHMDTRNFCDIGYQ

SEQ ID NO: 377 - protein, 80 aa, Homo sapiens
MKLSGMFLLLSLALFCFLTGVFSQGGQVDCGEFQDTKVYCTRESNPHCGSDGQTYGNKCAFCKAIVKSGGKISLKHPGKC

SEQ ID NO: 378 - protein, 301 aa, Homo sapiens
MARHGLPLLPLLSLLVGAWLKLGNGQATSMVQLQGGRFLMGTNSPDSRDGEGPVREATVKPFAIDIFPVTNKDFRDFVREKKYRTEAEMFGWSFVFEDFVSDELRNKATQPMKSVLWWLPVEKAFWRQPAGPGSGIRERLEHPVLHVSWNDARAYCAWRGKRLPTEEEWEFAARGGLKGQVYPWGNWFQPNRTNLWQGKFPKGDKAEDGFHGVSPVNAFPAQNNYGLYDLLGNVWEWTASPYQAAEQDMRVLRGASWIDTADGSANHRARVTTRMGNTPDSASDNLGFRCAADAGRPPGEL

SEQ ID NO: 379 - protein, 438 aa, Homo sapiens
MPCTCTWRNWRQWIRPLVAVIYLVSIVVAVPLCVWELQKLEVGIHTKAWFIAGIFLLLTIPISLWVILQHLVHYTQPELQKPIIRILWMVPIYSLDSWIALKYPGIAIYVDTCRECYEAYVIYNFMGFLTNYLTNRYPNLVLILEAKDQQKHFPPLCCCPPWAMGEVLLFRCKLGVLQYTVVRPFTTIVALICELLGIYDEGNFSFSNAWTYLVIINNMSQLFAMYCLLLFYKVLKEELSPIQPVGKFLCVKLVVFVSFWQAVVIALLVKVGVISEKHTWEWQTVEAVATGLQDFIICIEMFLAAIAHHYTFSYKPYVQEAEEGSCFDSFLAMWDVSDIRDDISEQVRHVGRTVRGHPRKKLFPEDQDQNEHTSLLSSSSQDAISIASSMPPSPMGHYQGFGHTVTPQTTPTTAKISDEILSDTIGEKKEPSDKSVDS

SEQ ID NO: 380 - protein, 107 aa, Homo sapiens
MVRYTYSMLSVIGISYAVLTWLSQTLWMPIYPLCVLAEAFAIYQSLPYFESFGTYSTKLPFDLSIYFPYVLKIYLMMLFIGMYFTYSHLYSERRDILGIFPIKKKKM

SEQ ID NO: 381 - protein, 234 aa, Homo sapiens
MRIRFTSPHPKDFPDEVLQLIHERDNICKQIHLPAQSGSSRVLEAMRRGYSREAYVELVHHIRESIPGVSLSSDFIAGFCGETEEDHVQTVSLLREVQYNMGFLFAYSMRQKTRAYHRLKDDVPEEVKLRRLEELITIFREEATKANQTSVGCTQLVLVEGLSKRSATDLCGRNDGNLKVIFPDAEMEDVNNPGLRVRAQPGDYVLVKITSASSQTLRGHVLCRTTLRDSSAYC

SEQ ID NO: 382 - protein, 470 aa, Homo sapiens
MWFTYLLLYLHSVRAYSSRGAGLLLLLGQVADGLCTPLVGYEADRAASCCARYGPRKAWHLVGTVCVLLSFPFIFSPCLGCGAATPEWAALLYYGPFIVIFQFGWASTQISHLSLIPELVTNDHEKVELTALRYAFTVVANITVYGAAWLLLHLQGSSRVEPTQDISISDQLGGQDVPVFRNLSLLVVGVGAVFSLLFHLGTRERRRPHAEEPGEHTPLLAPATAQPLLLWKHWLREPAFYQVGILYMTTRLIVNLSQTYMAMYLTYSLHLPKKFIATIPLVMYLSGFLSSFLMKPINKCIGRNMTYFSGLLVILAFAAWVALAEGLGVAVYAAAVLLGAGCATILVTSLAMTADLIGPHTNSGAFVYGSMSFLDKVANGLAVMAIQSLHPCPSELCCRACVSFYHWAMVAVTGGVGVAAALCLCSLLLWPTRLRRSRGGEHRTPSEGEGISTAPPPCWNETQPQGGAKL

SEQ ID NO: 383 - protein, 260 aa, Homo sapiens
MAGSPLLWGPRAGGVGLLVLLLLGLFRPPPALCARPVKEPRGLSAASPPLAETGAPRRFRRSVPRGEAAGAVQDLARALAHLLEAERQERARAEAQEAEDQQARVLAQLLRVWGAPRNSDPALGLDDDPDAPAAQLARALLRARLDPAALAAQLVPAPVPAAALRPRPPVYDDGPAGPDAEEAGDETPDVDPELLRYLLGRILAGSADSEGVAAPRRLRRAADHDVGSELPPEGVLGALLRVKRLETPAPQVPARRLLPP

SEQ ID NO: 384 - protein, 95 aa, Homo sapiens
MHLCICAVWVLVALLRMHGASPAQTSGTRSGNGGCRRHGAGQGRGAATQPLRPPRGTASGQLMALLSALLPRLSGSSTPMMAHGRPAPPQWSRVS

SEQ ID NO: 385 - protein, 130 aa, Homo sapiens
METLGALLVLEFLLLSPVEAQQATEHRLKPWLVGLAAVVGFLFIVYLVLLANRLWCSKARAEDEEETTFRMESNLYQDQSEDKREKKEAKEKEEKRKKEKKTAKEGESNLGLDLEEKEPGDHERAKSTVM

SEQ ID NO: 386 - protein, 41 aa, Homo sapiens
MNLSFLSFFLFFYLLWSPAESVYKKGMVKKNLSHSIVEKIK

SEQ ID NO: 387 - protein, 113 aa, Homo sapiens
  SITE (38): Xaa equals any amino acid
MRPLLLGGYWVLCLSVLGHAALYHFWLREEGKGPPQVXSVLALALPAGSCAPGLPFPGPLIPTQLLFALEWGTPTPLRDHPPHSMHSAPQNPPVFLGTHTCPPSWYFRLIPQA

SEQ ID NO: 388 - protein, 161 aa, Homo sapiens
MALSLTLCFVMFWTPNVSEKILIDIIGVDFAFAELCVVPLRIFSFFPVPVTVRAHLTGWLMTLKKTFVLAPSSVLRIIVLIASLVVLPYLGVHGATLGVGSLLAGFVGESTMVAIAACYVYRKQKKKMENESATEGEDSAMTDMPPTEEVTDIVEMREENE

SEQ ID NO: 389 - protein, 348 aa, Homo sapiens
MNMTQARVLVAAVVGLVAVLLYASIHKIEEGHLAVYYRGGALLTSPSGPGYHIMLPFITTFRSVQTTLQTDEVKNVPCGTSGGVMIYIDRIEVVNMLAPYAVFDIVRNYTADYDKTLIFNKIHHELNQFCSAHTLQEVYIELFDQIDENLKQALQKDLNLMAPGLTIQAVRVTKPKIPEAIRRNFELMEAEKTKLLIAAQKQKVVEKEAETERKKAVIEAEKIAQVAKIRFQQKVMEKETEKRISEIEDAAFLAREKAKADAEYYAAHKYATSNKHKLTPEYLELKKYQAIASNSKIYFGSNIPNMFVDSSCALKYSDIRTGRESSLPSKEALEPSGENVIQNKESTG

SEQ ID NO: 390 - protein, 44 aa, Homo sapiens
MPLCGLYCLRILMFPLRSANSVPLQCLPPSSLANKDSHFRAPRK

SEQ ID NO: 391 - protein, 50 aa, Homo sapiens
MPGILAGIPVKDLCLSLLQGFRLLLLCVCPGWLSGWMGGQKGSPRIVDIG

SEQ ID NO: 392 - protein, 206 aa, Homo sapiens
  SITE (143): Xaa equals any amino acid
MASHGLCPCLLMGTGWGLWTLLPDLEVMAGKGRMPFAGISVTSGFLRSLKRAPLPHTGSPDPRPSGIWSGVRTTSEEAGATSTQISTAAPRFHSRRKGPKRNLAPQLRVLVHRTVPPGQLVYAPQTVDSLRGTLLRPPAWLLXQVPCFYSGQPLLVSASVLCRDLMQFLFLLKSYLLPFLEVCRIGWEQIQRILGAGLWRQKEGNG

SEQ ID NO: 393 - protein, 75 aa, Homo sapiens [sequence omitted]

SEQ ID NO: 394 - protein, 97 aa, Homo sapiens [sequence omitted]

SEQ ID NO: 395 - protein, 187 aa, Homo sapiens
  SITE (167): Xaa equals any amino acid
MGFFLVLVMEQITLAYKEQSGPSPLEETRALLGTVNGGPQHWHDGPGVPQASGAPATPSALRACVLVFSLALHSVFEGLAVGLQRDRARAMELCLALLLHKGILAVSLSLRLLQSHLRAQVVAGCGILFSCMTPLGIGLGAALAESAGPLHQLAQSVLEGMAAGTFXYITFLEILLFHPKFKGVSRR

SEQ ID NO: 396 - protein, 46 aa, Homo sapiens
MTLSLQLAELVHFVCAFQSQWTGVYPMMPPLKPTEPLCFACVPCRV

SEQ ID NO: 397 - protein, 152 aa, Homo sapiens
  SITE (66): Xaa equals any amino acid
  SITE (77): Xaa equals any amino acid
  SITE (81): Xaa equals any amino acid
  SITE (84): Xaa equals any amino acid
  SITE (86): Xaa equals any amino acid
  SITE (87): Xaa equals any amino acid
  SITE (93): Xaa equals any amino acid
  SITE (103): Xaa equals any amino acid
  SITE (110): Xaa equals any amino acid
MDHSPTTGVVTVIVILIAIAALGAFDPGLLVLPAAAAHQPVRGRGEHRGGWGDQGTLPAGAVFGQXTVRGEKGQADXSQTXRKXTXXPGCKGXLVPVCKPAKXGLGGAKXIRMRCCLRGRADTCWHGLCGFRPSHALMPGDLAVLGFPSASR

SEQ ID NO: 398 - protein, 340 aa, Homo sapiens
MALRLLRRAARGAAAAALLRLKASLAADIPRLGYSSSSHHKYIPRRAVLYVPGNDEKKIKKIPSLNVDCAVLDCEDGVAANKKNEARLRIVKTLEDIDLGPTEKCVRVNSVSSGLAEEDLETLLQSRVLPSSLMLPKVESPEEIQWFADKFSFHLKGRKLEQPMNLIPFVETAMGLLNFKAVCEETLKVGPQVGLFLDAVVFGGEDFRASIGATSSKETLDILYARQKIVVIAKAFGLQAVDLVYIDFRDGAGLLRQSREGAAMGFTGKQVIHPNQIAVVQEQFSPSPEKIKWAEELIAAFKEHQQLGKGAFTFQGSMIDMPLLKQAQNTVTLATSIKEK

SEQ ID NO: 399 - protein, 64 aa, Homo sapiens
MVRHIRERRRQPLAFQRVLLSLCLLEGIWHSPAAAAGGGSHCSSWPSLYTTFQRVSLLELDLGL

SEQ ID NO: 400 - protein, 44 aa, Homo sapiens
  SITE (16): Xaa equals any amino acid
MCLPLLHCTGALWGKXVLLFLYCLAQSFAYSRHQTVGLVVHDYW

SEQ ID NO: 401 - protein, 221 aa, Homo sapiens
  SITE (184): Xaa equals any amino acid
MAGGVRPLRGLRALCRVLLFLSQFCILSGGESTEIPPYVMKCPSNGLCSRLPADCIDCTTNFSCTYGKPVTFDCAVKPSVTCVDQDFKSQKNFIINMTCRFCWQLPETDYECTNSTSCMTVSCPRQRYPANCTVRDHVHCLGNRTFPKMLYCNWTGGYKWSTALALSITLGGFGADRFYLGQWXEGLGKLFSFGGLGIWTLIDVLLIGVGYVGPADGSLYI

SEQ ID NO: 402 - protein, 39 aa, Homo sapiens
MWLTQPESLSLCVSVSQDWAHILALSITMLWDFREFPHL

SEQ ID NO: 403 - protein, 62 aa, Homo sapiens [sequence omitted]

SEQ ID NO: 404 - protein, 64 aa, Homo sapiens
MVSPLISALFHVPFLWLGMFFPHSLSGPFPSHLRRASSSRKPLVKPPRARQYPPLASSGYRGRI

SEQ ID NO: 405 - protein, 62 aa, Homo sapiens
MKNSTSLLYKLFSSLSVFIFKFLLLFYTLHIALGVKIQYKPLAHFIDHSCIQQVSQVQWSIP

SEQ ID NO: 406 - protein, 139 aa, Homo sapiens
MALGIQKRFSPEVLGLCASTALVWVVMEVLALLLGLYLATVRSDLSTFHLLAYSGYKYVGMILSVLTGLLFGSDGYYVALAWTSSALMYFIVRSLRTAALGPDSMGGPVPRQRLQLYLTLGAAAFQPLIIYWLTFHLVR

SEQ ID NO: 407 - protein, 42 aa, Homo sapiens
MRKEEGIAHLSIAFFVQVLCLYQLLPVILPQFNLGSGKNMNR

SEQ ID NO: 408 - protein, 121 aa, Homo sapiens
  SITE (30): Xaa equals any amino acid
  SITE (32): Xaa equals any amino acid
  SITE (87): Xaa equals any amino acid
  SITE (101): Xaa equals any amino acid
  SITE (115): Xaa equals any amino acid
MCSHSTLIHLYLVLPFFFLFLPSSFPFPSXSXSSILPSLRLPPFFPPSLFLHSSLPPSLSHPLGLSITSSRQSFLDYHHLCTKHLSXTLCGLIYHCLNIFXTRAVMWHMQVSFLXIHWLLP

SEQ ID NO: 409 - protein, 71 aa, Homo sapiens
MRIHFKILVLVIYFILLGSFSDRCSLLDCKSRIQRIFICNILNLSLVSCHLCRYSFDCLTRGKCFPLSFPA

SEQ ID NO: 410 - protein, 68 aa, Homo sapiens [sequence omitted]

SEQ ID NO: 411 - protein, 233 aa, Homo sapiens
  SITE (173): Xaa equals any amino acid
MHRGKLDCAGGALLSSYLIVLMILLAVVICTVSAIMCVSMRGTICNPGPRKSMSKLLYIRLALFFPEMVWASLGAAWVADGVQCDRTVVNGIIATVVVSWIIIAATVVSIIIVFDPLGGKMAPYSSAGPSHLDSHDSSQLLNGLKTAATSVWETRIKLLCCCIGKDDHTRVAXSSTAELFSTYFSDTDLVPSDIAAGLALLHQQQDNIRNNQDLPRWSAMPQGAPRKLIWMQN

SEQ ID NO: 412 - protein, 66 aa, Homo sapiens [sequence omitted]

SEQ ID NO: 413 - protein, 90 aa, Homo sapiens
  SITE (29): Xaa equals any amino acid
  SITE (30): Xaa equals any amino acid
  SITE (65): Xaa equals any amino acid
MLRCSFSSFLLCHTILLFLGSSAHLLVEXXVWGLYEYRIGDMVDQKATFCVQKQECLFPLGSWVXRVEGGAFAREPPSSTQYFPVSCLYQ

SEQ ID NO: 414 - protein, 36 aa, Homo sapiens
MGCTALLLLFHLCVPCEPYGTHEKELVPGLYFLVYR

SEQ ID NO: 415 - protein, 46 aa, Homo sapiens
MCIPEALGKNSLFLSSTFLWLLAFFGLWSHHSYLEGQHLQICFFFT

SEQ ID NO: 416 - protein, 82 aa, Homo sapiens
MAISCWASLTVKSLYCLLGFWWEAVISSNELPLPWICQEADGNLANSGRYQAPSSAPVTLFYTCGSTTVCSEGQSLPLLCFS

SEQ ID NO: 417 - protein, 57 aa, Homo sapiens
MPPHRQTDGQMGLPAPALWVWGLLLSSSFQTLLPAFPKPPALNLGCSTRPIPSFLKI

SEQ ID NO: 418 - protein, 81 aa, Homo sapiens
  SITE (44): Xaa equals any amino acid
MRMRVAVAPRPHQHLVVSVSWILAILISVSGYHCFHLQFSYMVXNIFPHVYLSSAYLLRPVICSDLLPVFVCLHVCLCLIF

SEQ ID NO: 419 - protein, 80 aa, Homo sapiens
MCVVCVCVWCMCVCGVCVCLCVCGVCMCISLNEKLAPMIMELTTPKVCRQQAGGPGGPVVWLQPVSEGLRTRRAGGAAAV

SEQ ID NO: 420 - protein, 53 aa, Homo sapiens
MSTFVCVCVFCFVLRSEARAKRKQDQRNTKRCLLTKGQRDLSVNQSKINRTAN

SEQ ID NO: 421 - protein, 80 aa, Homo sapiens
MALWVTCILSLCTWFSCLYGADSLANKCLSAGATRKAFPFCVLFRDLEVGLGFEGFVTHLACKLFCYCELSDSALSLGHE

SEQ ID NO: 422 - protein, 320 aa, Homo sapiens
MRGSVECTWGWGHCAPSPLLLWTLLLFAAPFGLLGEKTRQLLEFDSTNVSDTAAKPLGRPYPPYSLADFSWNNITDSLDPATLSATFQGHPMNDPTRTFANGSLAFRVQAFSRSSRPAQPPRLLHTADTCQLEVALIGASPRGNRSLFGLEVATLGQGPDCPSMQEQHSIDDEYAPAVFQLDQLLWGSLPSGFAQWRPVAYSQKPGGRESALPCQASPLHPALAYSLPQSPIVRAFFGSQNNFCAFNLTFGASTGPGYWDQHYLSWSMLLGVGFPPVDGLSPLVLGIMAVALGAPGLMLLGGGLVLLLHHKKYSEYQSIN

SEQ ID NO: 423 - protein, 115 aa, Homo sapiens
MLALSSSFLVLSYLLTRWCGSVGFILANCFNMGIRITQSLCFIHRYYRRAPTGPWLACTYRQSCSGHLPSVVGLLLFRRYSSAVSRAGQPDWHTLLWGPSVWEQLSGQHSSQRPS

SEQ ID NO: 424 - protein, 402 aa, Homo sapiens
MYSGNRSGGHGYWDGGGAAGAEGPAPAGTLSPAPLFSPGTYERLALLLGSIGLLGVGNNLLVLVLYYKFQRLRTPTHLLLVNISLSDLLVSLFGVTFTFVSCLRNGWVWDTVGCVWDGFSGSLFGIVSIATLTVLAYERYIRVVHARVINFSWAWRAITYIWLYSLAWAGAPLLGWNRYILDVHGLGCTVDWKSKDANDSSFVLFLFLGCLVVPLGVIAHCYGHILYSIRMLRCVEDLQTIQVIKILKYEKKLAKMCFLMIFTFLVCWMPYIVICFLVVNGHGHLVTPTISIVSYLFAKSNTVYNPVIYVFMIRKFRRSLLQLLCLRLLRCQRPAKDLPAAGSEMQIRPIVMSQKDGDRPKKKVTFNSSSIIFIITSDESLSVDDSDKTNGSKVDVIQVRPL

SEQ ID NO: 425 - protein, 76 aa, Homo sapiens [sequence omitted]

SEQ ID NO: 426 - protein, 41 aa, Homo sapiens
MAVPLFLYIFTLLPLLPFLLSLCFSPLTVKRSSSSESKSSL

SEQ ID NO: 427 - protein, 35 aa, Homo sapiens
IYSSGYFQIYNMLLLTILILLCNRTPELIPGFYIR

SEQ ID NO: 428 - protein, 484 aa, Homo sapiens
MPRHLSGLLLLLWPLLLLLPPTPAAPGPLARPGLRRLGTRGPGGSPGRRPVSAVPTRAPYSGAGQPGGARGAGVCRSRPLDLVFIIDSSRSVRPLEFTKVKTFVSQIIDTLDIGAADTRVAVVNYASTVKIEFHLQTHSDKQSLKQAVARITPLSTGTMSGLAIQTAMDEAFTVEAGARGPTSNIPKVAIIVTDGRPQDQVNEVAARARASGIELYAVGVDRADMESLKMMASEPLDEHVFYVETYGVIEKLSSRFQETFCALDPCVLGTHRCQHVCVSDGEGKHHCECSQGYSLNADQKTCSAIDKCALNTHGCEHICVNDRTGSYHCECYEGYTLNQDRKTCSAQDQCAFGTHGCQHICVNDRDGSHHCECYEGYTLNADNKTCSVRSECAGGSHGCQHLCVDDGPAAYHCDCFPGYTLTEDRRTCAAIEEARRLVSTEDACGCEATLAFQERASSYLQRLNAKLDDILGKLQADAYGQIHR

SEQ ID NO: 429 - protein, 129 aa, Homo sapiens
MAPSGPLLLVLLVPLAAARAGPYFRPGRGCRLPLRGDQLSGLGRRTYPRPHEYLSPSDLPKSWDWRNVNGVNYASATRNQHIPQYCGSCWAHGSTSAMAGPDQHQEKGGVALHPAVRAARPRLRQRGLL

SEQ ID NO: 430 - protein, 164 aa, Homo sapiens
MTTWSCLVAMIVSGVITAVWAVRAAPIWRSQVKQKMRIGKQGNCRPPRCICSALGLLAPWMAVVLSQLSVRCVVSWVQGKPSSPRPRGSAASPAPGATPPTPRKPVSWLGYRENHRPKKPKSCTRLPGLPKLEPSSTLKGQDSWQMGHQQDKTLWSWASTGGSS

SEQ ID NO: 431 - protein, 56 aa, Homo sapiens [sequence omitted]

SEQ ID NO: 432 - protein, 40 aa, Homo sapiens
MVAMVFLKISVLPLMCRGQTKHKVLRDHAYPRVSQKRGHI

SEQ ID NO: 433 - protein, 41 aa, Homo sapiens
MCVCLICSICQFLWCKYSHYSCFQANIVIPQKMELGRHNQD

SEQ ID NO: 434 - protein, 211 aa, Homo sapiens
MVFLKFFCMSFFCHLCQGYFDGPLYPEMSNGTLHHYFVPDGDYEENDDPEKCQLLFRVSDHRRCSQGEGSQVGSLLSLTLREEFTVLGHQVEDAGRVLEGISKSISYDLDGEESYGKYLRRESHQIGDAYSNSDKSLTELESKFKQGQEQDSRQESRLNEDFLGMLVHTRSLLKETLDISVGLRDKYELLALTIRSHGTRLGRLKNDYLKV

SEQ ID NO: 435 - protein, 53 aa, Homo sapiens
  SITE (49): Xaa equals any amino acid
MSHHAGLGGGILFSLKISFFIALAVVGGSRGVNDCQLGGCRVGSCPRVXVRVA

SEQ ID NO: 436 - protein, 48 aa, Homo sapiens [sequence omitted]

SEQ ID NO: 437 - protein, 201 aa, Homo sapiens [sequence omitted]

SEQ ID NO: 438 - protein, 420 aa, Homo sapiens
MAPWPPKGLVPAVLWGLSLFLNLPGPIWLQPSPPPQSSPPPQPHPCHTCRGLVDSFNKGLERTIRDNFGGGNTAWEEENLSKYKDSETRLVEVLEGVCSKSDFECHRLLELSEELVESWWFHKQQEAPDLFQWLCSDSLKLCCPAGTFGPSCLPCPGGTERPCGGYGQCEGEGTRGGSGHCDCQAGYGGEACGQCGLGYFEAERNASHLVCSACFGPCARCSGPEESNCLQCKKGWALHHLKCVDIDECGTEGANCGADQFCVNTEGSYECRDCAKACLGCMGAGPGRCKKCSPGYQQVGSKCLDVDECETEVCPGENKQCENTEGGYRCICAEGYKQMEGICVKEQIPESAGFFSEMTEDELVVLQQMFFGIIICALATLAAKGDLVFTAIFIGAVAAMTGYWLSERSDRVLEGFIKGR

SEQ ID NO: 439 - protein, 102 aa, Homo sapiens
MTVRRLSLLCRDLWALWLLLKAGAVRGARAGPRLPGRCCGATCGDAGRGWTFWAQPCPQRLLGQKPGAGGCRGWVLGWVPPRPEEPCSLAGKVCTGLARWMV

SEQ ID NO: 440 - protein, 53 aa, Homo sapiens
  SITE (11): Xaa equals any amino acid
MCKAVCKHRLXLFAVSSFSLGLGWVCVLVLMLWPVRLSLAPRPVQLQQRRSHC

SEQ ID NO: 441 - protein, 472 aa, Homo sapiens
MKFLIFAFFGGVHLLSLCSGKAICKNGISKRTFEEIKEEIASCGDVAKAIINLAVYGKAQNRSYERLALLVDTVGPRLSGSKNLEKAIQIMYQNLQQDGLEKVHLEPVRIPHWERGEESAVMLEPRIHKIAILGLGSSIGTPPEGITAEVLVVTSFDELQRRASEARGKIVVYNQPYINYSRTVQYRTQGAVEAAKVGALASLIRSVASFSIYSPHTGIQEYQDGVPKIPTACITVEDAEMMSRMASHGIKIVIQLKMGAKTYPDTDSFNTVAEITGSKYPEQVVLVSGHLDSWDVGQGAMDDGGGAFISWEALSLIKDLGLRPKRTLRLVLWTAEEQGGVGAFQYYQLHKVNISNYSLVMESDAGTFLPTGLQFTGSEKARAIMEEVMSLLQPLNITQVLSHGEGTDINFWIQAGVPGASLLDDLYKYFFFHHSHGDTMTVMDPKQMNVAAAVWAVVSYVVADMEEMLPRS

SEQ ID NO: 442 - protein, 359 aa, Homo sapiens
MKLGCVLMAWALYLSLGVLWVAQMLLAASFETLQCEGPVCTEESSCHTEDDLTDAREAGFQVKAYTFSEPFHLIVSYDWLILQGPAKPVFEGDLLVLRCQAWQDWPLTQVTFYRDGSALGPPGPNREFSITVVQKADSGHYHCSGIFQSPGPGIPETASVVAITVQELFPAPILRAVPSAEPQAGGPMTLSCQTKLPLQRSAARLLFSFYKDGRIVQSRGLSSEFQIPTASEDHSGSYWCEAATEDNQVWKQSPQLEIRVQGASSSAAPPTLNPAPQKSAAPGTAPEEAPGPLPPPPTPSSEDPGFSSPLGMPDPHLYHQMGLLLKHMQDVRVLLGHLLMELRELSGHRKPGTTKATAE

SEQ ID NO: 443 - protein, 379 aa, Homo sapiens
  SITE (283): Xaa equals any amino acid
  SITE (303): Xaa equals any amino acid
  SITE (307): Xaa equals any amino acid
MGYIDDPDKYHQGFELLLSALGDPSERVVSATHQVFLPAYAAWTTELGNLQSHLILTLLNKIEKLLREGEHGLDEHKLHMYLSALQSLIPSLFALVLQNAPFSSKAKLHGEVPQIEVTRFPRPMSPLQDVSTIIGSREQLAVLLQLYDYQLEQEGTTGWESLLWVVNQLLPQLIEIVGKINVTSTACVHEFSRFFWRLCRTFGKIFTNTKVKPQFQEILRLSEENIDSSAGNGVLTKATVPIYATGVLTCYIQEEDRKLLVGFLEDVMTLLSLSHAPLDSLKXSFVELGANQAYHELLLTVLXYGVXHTSALVRCTAARMFELLVKGVNETLVAQRVVPALITLSSDPEISVRIATIPAFGTIMETVIQRELLERVKMQ

SEQ ID NO: 444 - protein, 48 aa, Homo sapiens
MSTVTWLLKLFTQFMFPPTVSNSHTCARYYVFNFCLIISFNFNFHYHW

SEQ ID NO: 445 - protein, 142 aa, Homo sapiens [sequence omitted]

SEQ ID NO: 446 - protein, 399 aa, Homo sapiens
MGILLGLLLLGHLTVDTYGRPILEVPESVTGPWKGDVNLPCTYDPLQGYTQVLVKWLVQRGSDPVTIFLRDSSGDHIQQAKYQGRLHVSHKVPGDVSLQLSTLEMDDRSHYTCEVTWQTPDGNQVVRDKITELRVQKLSVSKPTVTTGSGYGFTVPQGMRISLQCQARGSPPISYIWYKQQTNNQEPIKVATLSTLLFKPAVIADSGSYFCTAKGQVGSEQHSDIVKFVVKDSSKLLKTKTEAPTTMTYPLKATSTVKQSWDWTTDMDGYLGETSAGPGKSLPVFAIILIISLCCMVVFTMAYIMLCRKTSQQEHVYEAARAHAREANDSGETMRVAIFASGCSSDEPTSQNLGNNYSDEPCIGQEYQIIAQINGNYARLLDTVPLDYEFLATEGKSVC

SEQ ID NO: 447 - protein, 223 aa, Homo sapiens
MKFVPCLLLVTLSCLGTLGQAPRQKQGSTGEEFHFQTGGRDSCTMRPSSLGQGAGEVWLRVDCRNTDQTYWCEYRGQPSMCQAFAADPKSYWNQALQELRRLHHACQGAPVLRPSVCREAGPQAHMQQVTSSLKGSPEPNQQPEAGTPSLRPKATVKLTEATQLGKDSMEELGKAKPTTRPTAKPTQPGPRPGGNEEAKKKAWEHCWKPFQALCAFLISFFRG

SEQ ID NO: 448 - protein, 135 aa, Homo sapiens
MGLWLGMLACVFLATAAFVAYTARLDWKLAAEEAKKHSGRQQQQRAESTATRPGPEKAVLSSVATGSSPGITLTTYSRSECHVDFFRTPEEAHALSAPTSRLSVKQLVIRRGAALGAASATLMVGLTVRILATRH

SEQ ID NO: 449 - protein, 181 aa, Homo sapiens
MTVILIILIVVMARYCRSKNKNGYEAGKKDHEDFFTPQQHDKSKKPKKDKKNKKSKQPLYSSIVTVEASKPNGQRYDSVNEKLSDSPSMGRYRSVNGGPGSPDLARHYKSSSPLPTVQLHPQSPTAGKKHQAVQDLPPANTFVGAGDNISIGSDHCSEYSCQTNNKYSKQMRLHPYITVFG

SEQ ID NO: 450 - protein, 58 aa, Homo sapiens
MRTFLTFVILKVILIFLSSCASFTRNLLTWPNDVSTEQFETRPFGSELLQTVINVSRT

SEQ ID NO: 451 - protein, 950 aa, Homo sapiens
MTWRMGPRFTMLLAMWLVCGSEPHPHATIRGSHGGRKVPLVSPDSSRPARFLRHTGRSRGIERSTLEEPNLQPLQRRRSVPVLRLARPTEPPARSDINGAAVRPEQRPAARGSPREMIRDEGSSARSRMLRFPSGSSSPNILASFAGKNRVWVISAPHASEGYYRLMMSLLKDDVYCELAERHIQQIVLFHQAGEEGGKVRRITSEGQILEQPLDPSLIPKLMSFLKLEKGKFGMVLLKKTLQVEERYPYPVRLEAMYEVIDQGPIRRIEKIRQKGFVQKCKASGVEGQVVAEGNDGGGGAGRPSLGSEKKKEDPRRAQVPPTRESRVKVLRKLAATAPALPQPPSTPRATTLPPAPATTVTRSTSRAVTVAARPMTTTAFPTTQRPWTPSPSHRPPTTTEVITARRPSVSENLYPPSRKDQHRERPQTTRRPSKATSLESFTNAPPTTISEPSTRAAGPGRFRDNRMDRREHGHRDPNVVPGPPKPAKEKPPKKKAQDKILSNEYEEKYDLSRPTASQLEDELQVGNVPLKKAKESKKHEKLEKPEKEKKKKMKNENADKLLKSEKQMKKSEKKSKQEKEKSKKKKGGKTEQDGYQKPTNKHFTQSPKKSVADLLGSFEGKRRLLLITAPKAENNMYVQQRDEYLESFCKMATRKISVITIFGPVNNSTMKIDHFQLDNEKPMRVVDDEDLVDQRLISELRKEYGMTYNDFFMVLTDVDLRVKQYYEVPITMKSVFDLIDTFQSRIKDMEKQKKEGIVCKEDKKQSLENFLSRFRWRRRLLVISAPNDEDWAYSQQLSALSGQACNFGLRHITILKLLGVGEEVGGVLELFPINGSSVVEREDVPAHLVKDIRNYFQVSPEYFSMLLVGKDGNVKSWYPSPMWSMVIVYDLIDSMQLRRQEMAIQQSLGMRCPEDEYAGYGYHSYHQGYQDGYQDDYRHHESYHHGYPY

SEQ ID NO: 452 - protein, 260 aa, Homo sapiens
MLALLGLSQALNILLGLKGLAPAEISAVCEKGNFNVAHGLAWSYYIGYLRLILPELQARIRTYNQHYNNLLRGAVSQRLYILLPLDCGVPDNLSMADPNIRFLDKLPQQTGDRAGIKDRVYSNSIYELLENGQRAGTCVLEYATPLQTLFAMSQYSQAGFSGEDRLEQAKLFCRTLEDILADAPESQNNCRLIAYQEPADDSSFSLSQEVLRHLRQEEKEEVTVGSLKTSAVPSTSTMSQEPELLISGMEKPLPLRTDFS

SEQ ID NO: 453 - protein, 35 aa, Homo sapiens
MPLPSSFPLPVFLSSCPFLMSVSIGFLILVFNVHP

SEQ ID NO: 454 - protein, 55 aa, Homo sapiens
MVNIFGFVSCIVFRCSCSALLHESNHRPYLNKWSLLSTNKTLFRNNRGLDLVLVC

SEQ ID NO: 455 - protein, 78 aa, Homo sapiens
MVCFQSNKPSTSTWRQLSFVFVLFCLFCLGHAFLSLPFYILSIIAMCLEQWAFHNMNSLYHHEWEVRGNLIHVDFTLP

SEQ ID NO: 456 - protein, 41 aa, Homo sapiens [sequence omitted]

SEQ ID NO: 457 - protein, 56 aa, Homo sapiens
  SITE (32): Xaa equals any amino acid
MLSFFICLLIFVHLLLLSFLISDWPPPTGSAXHKILRLMVVQRLSLLDQRKRWSEA

SEQ ID NO: 458 - protein, 90 aa, Homo sapiens
MAIRLVFLALAGLVDGKPVWITLWMDAKRPNLAGTGSTWGSRRDSHCCHGPTAWSLPCLLCLFRAQQKDRERSLLGVPLPTLQGGNLSDG

SEQ ID NO: 459 - protein, 282 aa, Homo sapiens
MLALTLAKADSPRTALLCSAWLLTASFSAQQHKGSLQVHQTLSVEMDQVLKALSFPKKKAALLSAAILCFLRTALRQSFSSALVALVPSGAQPLPATKDTVLAPLRMSQVRSLVIGLQNLLVQKDPLLSQACVGCLEALLDYLDARSPDIALHVASQPWNRFLLFTLLDAGENSFLRPEILRLMTLFMRYRSSSVLSHEEVGDVLQGVALADLSTLSNTTLQALHGFFQQLQSMGHLADHSMAQTLQASLEGLPPSTSSGQPPLQDMLCLGGVAVSLSHIRN

SEQ ID NO: 460 - protein, 178 aa, Homo sapiens
MLPLLIICLLPAIEGKNCLRCWPELSALIDYDLQILWVTPGPPTELSQSIHSLFLEDNNFLKPWYLDRDHLEEETAKFFTQVHQAIKTLRDDKTVLLEEIYTHKNLFTERLNKISDGLKEKGAPPLSMNAFPAPSPTCTPEPLGSVCLPSTSVSLPSHPPWQPAMSPVPGTGGPPCGL

SEQ ID NO: 461 - protein, 298 aa, Homo sapiens
  SITE (42): Xaa equals any amino acid
  SITE (58): Xaa equals any amino acid
MARRSRHRLLLLLLRYLVVALGYHKAYGFSAPKDQQVVTAVXYQEAILACKTPKKTVXSRLEWKKLGRSVSFVYYQQTLQGDFKNRAEMIDFNIRIKNVTRSDAGKYRCEVSAPSEQGQNLEEDTVTLEVLVAPAVPSCEVPSSALSGTVVELRCQDKEGNPAPEYTWFKDGIRLLENPRLGSQSTNSSYTMNTKTGTLQFNTVSKLDTGEYSCEARNSVGYRRCPGKRMQVDDLNISGIIAAVVVVALVISVCGLGVCYAQRKGYFSKETSFQKSNSSSKATTMSENDFKHTKSFII

SEQ ID NO: 462 - protein, 46 aa, Homo sapiens
MEPVALLQPTWWLLNVTLPLVAWSGPLICRPLLHGEGRQGAACLQG

SEQ ID NO: 463 - protein, 44 aa, Homo sapiens
MGWLWLELLGLSIEETLVWAFLNKFLDSSAALLWRILGKSNLST

SEQ ID NO: 464 - protein, 158 aa, Homo sapiens
MALEVLMLLAVLIWTGAENLHVKISCSLDWLMVSVIPVAESRNLYIFADELHLGMGCPANRIHTYVYEFIYLVRDCGIRTRVVSEETLLFQTELYFTPRNIDHDPQEIHLECSTSRKSVWLTPVSTENEIKLDPSPFIADFQTTAEELGLLSSSPNLL

SEQ ID NO: 465 - protein, 101 aa, Homo sapiens
  SITE (67): Xaa equals any amino acid
MELERCSVVLCILANLAVLRALFLPCIIFHCVSDSRSVNRETKVKFVHTSVHGVGHSFVQSAFKAFXLVPPEAVPEQKDPDPEFPTVKYPNPEEGKGVLVT

SEQ ID NO: 466 - protein, 71 aa, Homo sapiens
MVQGPLTHLMLVLLISLIFLSRGSGRAWAFSHSCFKTSDLLPCRNRWEVIEFLHYSNLHSHISLSVTKTFL

SEQ ID NO: 467 - protein, 230 aa, Homo sapiens
MASLGLQLVGYILGLLGLLGTLVAMLLPSWKTSSYVGASIVTAVGFSKGLWMECATHSTGITQCDIYSTLLGLPADIQAAQAMMVTSSAISSLACIISVVGMRCTVFCQESRAKDRVAVAGGVFFILGGLLGFIPVAWNLHGILRDFYSPLVPDSMKFEIGEALYLGIISSLFSLIAGIILCFSCSSQRNRSNYYDAYQAQPLATRSSPRPGQPPKVKSEFNSYSLTGYV

SEQ ID NO: 468 - protein, 37 aa, Homo sapiens
MCYIPGSTGGQCWPWCWCWLCREALEWLCGAVSAGPA

SEQ ID NO: 469 - protein, 133 aa, Homo sapiens
MRVPLVLSWAFVLVGFSGVYLASESFWFPPSLCDLTSPPGLHLWKFIRDLVSMEELTDSAREMGYWMMVFSLKAMFPVSSGCFQERQETNKSLTLLRCSQRDTSPLMDGQTWARVRVTKPPTTATAAYNRHIR

SEQ ID NO: 470 - protein, 42 aa, Homo sapiens
MFLFITFTILAIFIIEPRNLRVDLNLIKFQTSWPKTLVEEQN

SEQ ID NO: 471 - protein, 56 aa, Homo sapiens
MFLKVLVFLIFFSPFSSSLFSGEAVRGRGAGLGLGIGRGWTSCLSVLNGCDGARSH

SEQ ID NO: 472 - protein, 52 aa, Homo sapiens
MGPCRASRCLSLLVLFPPGVAGRPAPGRLHPVPTGPLPRMYSAGARGRHGAH

SEQ ID NO: 473 - protein, 50 aa, Homo sapiens
MDGGPGAFSRAWVLQIPWLLLSGGNFALCEPRPCPSAGHPWQEAGLPSSP

SEQ ID NO: 474 - protein, 45 aa, Homo sapiens
MLVSLIICLLLDLLNQPSLLRDLILKQHTGNPHLSFPLKYSHWMG

SEQ ID NO: 475 - protein, 168 aa, Homo sapiens
MVTFITATLWIAVFSYIMVWLVTIIGYTLGIPDVIMGITFLAAGQVSRLHGQPNCGETRPWGHGSLQHHRSNVFDILVGLGVPWGLQTMVVNYGSTVKINSRGLVYSVVLLLGSVALTVLGIHLNKWRLDRKLGVYVLVLYAIFLCFSIMIEFNVFTFVNLPMCREDD

SEQ ID NO: 476 - protein, 43 aa, Homo sapiens [sequence omitted]

SEQ ID NO: 477 - protein, 52 aa, Homo sapiens
MKCFFLFVVILIIMKSNLSDIIIATYTYCIPDYFFHTFIFNLSVYLNSKFIS

SEQ ID NO: 478 - protein, 51 aa, Homo sapiens
MIKHVAWLIFTNCIFFCPVAFFSFAPLITAISISPEIMKSVTLIFFPCLLA

SEQ ID NO: 479 - protein, 118 aa, Homo sapiens
MCYLLLLLIQTAELLIHPQGLQAVSNGESALKGTRPTFSSPFILVTEGRKEWEGVFLSSGWKGNTLSNYYISLVFYYSRILQPYFYCLWGKLEMVTLIRSVWRGINGGDKISVGFGKC

SEQ ID NO: 480 - protein, 169 aa, Homo sapiens
MWAVLRLALRPCARASPAGPRAYHGDSVASLGTQPDLGSALYQENYKQMKALVNQLHERVEHIKLGGGEKARALHISRGKLLPRERIDNLIDPGSPFLELSQFAGYQLYDNEEVPGGGIITGIGRVSGVECMIIANDATVKGGAYYPVTVKKQLRAQEIAMQTGSPAST

SEQ ID NO: 481 - protein, 47 aa, Homo sapiens
MTAGFMGMAVAIILFGWIIGVLGCCWDRGLMQYVAGCSSSWEGKQWN

SEQ ID NO: 482 - protein, 203 aa, Homo sapiens
MQLGSVLLTRCPFWGCFSQLMLYAERAEARRKPDIPVPYLYFDMGAAVLCASFMSFGVKRRWFALGAALQLAISTYAAYIGGYVHYGDWLKVRMYSRTVAIIGGFLVLASGAGELYRRKPRSRSLQSTGQVFLGIYLICVAYSLQHSKEDRLAYLNHLPGGELMIQLFFVLYGILAPGLSVRLLRDPRCPDPGCTAAPCHAAH

SEQ ID NO: 483 - protein, 123 aa, Homo sapiens
MHDGSKPFPRYGYKPSPPNGCGSPLFGVHLNIGIPSLTKCCNQHDRCYETCGKSKNDCDEEFQYCLSKICRDVQKTLGLTQHVQACETTVELLFDSVIHLGCKPYLDSQRAACRCHYEEKTDL

SEQ ID NO: 484 - protein, 23 aa, Homo sapiens
LGSLSTAPSSALPTLGARRTRSK

SEQ ID NO: 485 - protein, 60 aa, Homo sapiens
MGNCQAGHNLHLCLAHHPPLVCATLILLLLGLSGLGLGSFLLTHRTGLRTLTSPRTGSLF

SEQ ID NO: 486 - protein, 173 aa, Homo sapiens
MEAPGPRALRTALCGGCCCLLLCAQLAVAGKGARGFGRGALIRLNIWPAVQGACKQLEVCEHCVEGDRARNLSSCMWEQCRPEEPGHCVAQSEVVKEGCSIYNRSEACPAAHHHPTYEPKTVTTGSPPVPEAHSPGFDGASFIGGVVLVLSLQAVAFFVLHFLKAKDSTYQTL

SEQ ID NO: 487 - protein, 210 aa, Homo sapiens
  SITE (139): Xaa equals any amino acid
  SITE (187): Xaa equals any amino acid
MEAPGPRALRTALCGGCCCLLLCAQLAVAGKGARGFGRGALIRLNIWPAVQGACKQLEVCEHCVEGDRARNLSSCMWEQCRPEEPGHCVAQSEVVKEGCSIYNRSEACPAAHHHPTYEPKTVTTGSPPVPEAHSPGFDXASFIGGVVLVLSLQAVAFFVLTSSRPRTAPTRRCEYLASSKYLSPSSXLVPAHVPFSTQGAVFSTGKPSGR

SEQ ID NO: 488 - protein, 105 aa, Homo sapiens
  SITE (70): Xaa equals any amino acid
MISYIVLLSILLWPLVVYHELIQRMYTRLEPLLMQLDYSMKAEANALHHKHDKRKRQGKNAPPGGDEPLXETESESEAELAGFSPVVDVKKTALALAIYRLRAVR

SEQ ID NO: 489 - protein, 89 aa, Homo sapiens
  SITE (24): Xaa equals any amino acid
  SITE (75): Xaa equals any amino acid
MFKDYPPAIKPSYDVLLLLLLLVXLLQAGLNTGTAIQCVRFKVSARLQGASWDTQNGPQERLAGEVARSPLKEFXKEKAWRAVVVQMAQ

SEQ ID NO: 490 - protein, 127 aa, Homo sapiens [sequence omitted]

SEQ ID NO: 491 - protein, 9 aa, Homo sapiens
LGKPWRYPT

SEQ ID NO: 492 - protein, 91 aa, Homo sapiens
  SITE (84): Xaa equals any amino acid
MYGKSSTRAVLLLLGIQLTALWPIAAVEIYTSRVLEAVNGTDARLKCTFSSFAPVGDALTVTWNFRPLDGGPEQFVFYYHIDPXPTHEWAV

SEQ ID NO: 493 - protein, 941 aa, Homo sapiens
  SITE (807): Xaa equals any amino acid
  SITE (809): Xaa equals any amino acid
  SITE (815): Xaa equals any amino acid
  SITE (819): Xaa equals any amino acid
MVFLPLKWSLATMSFLLSSLLALLTVSTPSWCQSTEASPKRSDGTPFPWNKIRLPEYVIPVHYDLLIHANLTTLTFWGTTKVEITASQPTSTIILHSHHLQISRATLRKGAGERLSEEPLQVLEHPPQEQIALLAPEPLLVGLPYTVVIHYAGNLSETFHGFYKSTYRTKEGELRILASTQFEPTAARMAFPCFDEPAFKASFSIKIRREPRHLAISNMPLVKSVTVAEGLIEDHFDVTVKMSTYLVAFIISDFESVSKITKSGVKVSVYAVPDKMNQADYALDAAVTLLEFYEDYFSIPYPLPKQDLAAIPDFQSGAMENWGLTTYRESALLFDAEKSSASSKLGITMTVAHELAHQWFGNLVTMEWWNDLWLNEGFAKFMEFVSVSVTHPELKVGDYFFGKCFDAMEVDALNSSHPVSTPVENPAQIREMFDDVSYDKGACILNMLREYLSADAFKSGIVQYLQKHSYKNTKNEDLWDSMASICPTDGVKGMDGFCSRSQHSSSSSHWHQEGVDVKTMMNTWTLQRGFPLITITVRGRNVHMKQEHYMKGSDGAPDTGYLWHVPLTFITSKSDMVHRFLLKTKTDVLILPEEVEWIKFNVGMNGYYIVHYEDDGWDSLTGLLKGTHTAVSSNDRASLINNAFQLVSIGKLSIEKALDLSLYLKHETEIMPVFQGLNELIPMYKLMEKRDMNEVETQFKAFLIRLLRDLIDKQTWTDEGSVSERMLRSELLLLACVHNYQPCVQRAEGYFRKWKESNGNLSLPVDVTLAVFAVGAQSTEGWDFLYSKYQFSLSSTEKSQIEFALCXPXNKEKLXWLLXESFKGDKIKTQEFPQILTLIGRNPVGYPLAWQFLRKNWNKLVQKFELGSSSIAHMVMGTTNQFSTRTRLEEVKGFFSSLKENGSQLRCVQQTIETIEENIGWMDKNFDKIRVWLQSEKLERM

SEQ ID NO: 494 - protein, 157 aa, Homo sapiens
MVKSVIFLSFWQGMLLAILEKCGAIPKIHSARVSVGEGTVAAGYHDFIICVEMFFAALALRHPFTYNVYADKRLDAQGRCAPMKSISSSLKETMNPHDIVQDAIHNFSPAYQQYTQQSTLEPGPTWRGGAHGLSRSHSLSGARDNEKTLLLSSDDEF

SEQ ID NO: 495 - protein, 118 aa, Homo sapiens
FLSSWQRPACGCQRPALPLHLGGAEQLGPSCPGGWVQTQAEDQPWPCPAICFHQAVSPPWLPFSLQAKVLLIPTPLVFACPALLFAWRVGGAQWQGISGPWGRGDGNMCPTAPSPPPP

SEQ ID NO: 496 - protein, 59 aa, Homo sapiens
MMKDVFFFLFLLAVWVVSFGVAKQAILIHNERRVDWLFRGPSTTPTSPSSGRSRATSTV

SEQ ID NO: 497 - protein, 109 aa, Homo sapiens
  SITE (94): Xaa equals any amino acid
MNTLVLWIFGFLICLGIILAIGNSIWESQTGDQFRTFLFWNEGEKSSVFSGFLTFWSYIIILNTVVPISLYVSVEVIRLGHSYFINWDRKMYYXRKAIPAVARTTTLNE

SEQ ID NO: 498 - protein, 46 aa, Homo sapiens
  SITE (45): Xaa equals any amino acid
INHVFIWGSIAIYFSILFTMHSNGIFGIFPNQFPFVGNARHSLTXK

SEQ ID NO: 499 - protein, 6 aa, Homo sapiens
TVAIYD

SEQ ID NO: 500 - protein, 11 aa, Homo sapiens
FLVCLLLGPRS

SEQ ID NO: 501 - protein, 56 aa, Homo sapiens
  SITE (35): Xaa equals any amino acid
  SITE (42): Xaa equals any amino acid
  SITE (46): Xaa equals any amino acid
KSQMQSFTIVTAYGRCLSLTCLPTLNQMLVFKSNXSLVSPHXLTFXNIFARFENFQ

SEQ ID NO: 502 - protein, 53 aa, Homo sapiens
NYNRGGTFLYQKAKIKHHVLMVFYKSTSNSTESLIWSLLNSWSDKVTFPKRVR

SEQ ID NO: 503 - protein, 46 aa, Homo sapiens; identical to SEQ ID NO: 338

SEQ ID NO: 504 - protein, 64 aa, Homo sapiens
  SITE (7): Xaa equals any amino acid
  SITE (27): Xaa equals any amino acid
SWVIVVXIWGYLLEGHGVPFCKSYGPXPWKLHTHHAAYNSGSSQVYRILGNSPCPVLIHCSFSG

SEQ ID NO: 505 - protein, 14 aa, Homo sapiens
  SITE (9): Xaa equals any amino acid
  SITE (14): Xaa equals any amino acid
WKGLLEGSXEATMX

SEQ ID NO: 506 - protein, 107 aa, Homo sapiens
  SITE (66): Xaa equals any amino acid
PLGREPLAGFLSFLSFSLLWCLEAFPRLQFLTTLTDFAIVLSPPLSFPKLTLWRLIKRKNHRPGAXLTPRRRANHLRCGVRDQPDQNRETPSLLNNTKLAGRGGARL

SEQ ID NO: 507 - protein, 127 aa, Homo sapiens
MPRAPWRIPLCALPTLCLGSPLPSQPTHPIFYDHRAPTWKMAHPGGPRSSHSPRGPGGHPALRQRLPCRRGEPETALCSSAPGAGFAEPPCKASPGWGPPSRGPQGDRSQGEWLPALGTPCGGPDDS

SEQ ID NO: 508 - protein, 90 aa, Homo sapiens
  SITE (31): Xaa equals any amino acid
  SITE (57): Xaa equals any amino acid
MPRAPWRIPLCALPTLCLGSPLPSQPTHPIXYDHRAPTWKMAHPGGPRSSHSPRTWXTPSSQTKAALPAGGARNSPLQLCTRSRFCGTPM

SEQ ID NO: 509 - protein, 308 aa, Homo sapiens
  SITE (87): Xaa equals any amino acid
  SITE (185): Xaa equals any amino acid
MPVPWFLLSLALGRSPVVLSLERLVGPQDATHCSPGLSCRLWDSDILCLPGDIVPAPGPVLAPTHLQTELVLRCQKETDCDLCLRVXVHLAVHGHWEEPEDEEKFGGAADLGVEEPRNASLQAQVVLSFQAYPTARCVLLEVQVPAALVQFGQSVGSVVYDCFEAALGSEVRIWSYTQPRYEKEXNHTQQLPDCRGLEVWNSIPSCWALPWLNVSADGDNVHLVLNVSEEQHFGLSLYWNQVQGPPKPRWHKNLTGPQIITLNHTDLVPCLCIQVWPLEPDSVRRTSAPSGRTPAHTRTSGKPPDCDC

SEQ ID NO: 510 - protein, 55 aa, Homo sapiens
MSSDFLCFFFKLCNQMILCFFFRGAEYWFLLLVVFSFLCHSCFFFVFSVSNTICI

SEQ ID NO: 511 - protein, 98 aa, Homo sapiens; identical to SEQ ID NO: 344

SEQ ID NO: 512 - protein, 22 aa, Homo sapiens
LPRPCAPSPVWRQVGREEASLL

SEQ ID NO: 513 - protein, 25 aa, Homo sapiens
  SITE (9): Xaa equals any amino acid
CAVRFREQXAPERVFLPTRGRKSEP

SEQ ID NO: 514 - protein, 365 aa, Homo sapiens
  SITE (144): Xaa equals any amino acid
  SITE (201): Xaa equals any amino acid
MFVGLMAFLLSFYLIFTNEGRALKTATSLAEGLSLVVSPDSIHSVAPENEGRLVHIIGALRTSKLLSDPNYGVHLPAVKLRRHVEMYQWVETEESREYTEDGQVKKETRYSYNTEWRSEIINSKNFDREIGHKNPSAMAVESFXATAPFVQIGRFFLSSGLIDKVDNFKSLSLSKLEDPHVDIIRRGDFFYHSENPKYPEXGDLRVSFSYAGLSGDDPDLGPAHVVTVIARQRGDQLVPFSTKSGDTLLLLHHGDFSAEEVFHRELRSNSMKTWGLRAAGWMAMFMGLNLMTRILYTLVDWFPVFRDLVNIGLKAFAFCVATSLTLLTVAAGWLFYRPLWALLIAGLALVPILVARTRVPAKKLE

SEQ ID NO: 515 - protein, 108 aa, Homo sapiens
  SITE (48): Xaa equals any amino acid
  SITE (55): Xaa equals any amino acid
  SITE (58): Xaa equals any amino acid
  SITE (67): Xaa equals any amino acid
MFYKLTLILCELSVAGVTQAASQRPLQRLPRHICSQRNPPGRCLLKAXLQTTWGXPDXQFPGCPHPXRVTLNARQMGNGKEKKAADLKLKFPQKRFYLSAFSERIKAF

SEQ ID NO: 516 - protein, 73 aa, Homo sapiens
  SITE (38): Xaa equals any amino acid
  SITE (48): Xaa equals any amino acid
  SITE (54): Xaa equals any amino acid
  SITE (55): Xaa equals any amino acid
  SITE (68): Xaa equals any amino acid
MFYKLTLILCELSVAGVTQAASQRPLQRLPRHICSQRXPPGRCLLKAXLQTTWXXPDKPIPRLSPPLXSDPKR

SEQ ID NO: 517 - protein, 81 aa, Homo sapiens
MSKRSASFILLPLLFLKGSFAKLNARISDCLEERYCHNLWMVFQGCVITELHLSRMSKTLSSLCYDFVINVYIFFKFLDIT

SEQ ID NO: 518 - protein, 122 aa, Homo sapiens
  SITE (89): Xaa equals any amino acid
  SITE (91): Xaa equals any amino acid
  SITE (94): Xaa equals any amino acid
  SITE (97): Xaa equals any amino acid
  SITE (98): Xaa equals any amino acid
MHRSEPFLKMSLLILLFLGLAEACTPREVNLLKGIIGLMSRLSPDEILGLLSLQVLHEETSGCKEEVKPFSGTTPSRKPLPKREEHVEXPXNAXTWXXTYLFVSYNKGDWFTFSSQVLLPLL

SEQ ID NO: 519 - protein, 11 aa, Homo sapiens
MSGGLSFLLLV

SEQ ID NO: 520 - protein, 130 aa, Homo sapiens
STCCGWGPLGHSRVRGCHCHLGHVGRHQHFVVTNSTVTNIFGQIPFYTSRQLLVCNPTGQREGPVTWLSHCPAPQMVLGLLFSLGPANTTVFTSAHWLSAVVPGSQWHVSPRSSLIPQHTPKGSVANTLN

SEQ ID NO: 521 - protein, 122 aa, Homo sapiens
  SITE (19): Xaa equals any amino acid
  SITE (73): Xaa equals any amino acid
KAPSSHPGLTCVSLSRLQXSLSLCFPSGPCWAGLLSSLALAGGAPGALPPWQPGQDSKMRTAELVGGSHGPAXGPGEAEPEPTAVVLWTVDPEGGLGQVPAEGPGGLCVPLGPGALVTWTPG

SEQ ID NO: 522 - protein, 243 aa, Homo sapiens; identical to SEQ ID NO: 376

SEQ ID NO: 523 - protein, 154 aa, Homo sapiens
  SITE (150): Xaa equals any amino acid
MARHGLPLLPLLSLLVGAWLKLGNGQATSMVQLQGGRFLMGTNSPDSRDGEGPVREATVKPFAIDIFPVTNKDFRDFVREKKYRTEAEMFGWSFVFEDFVSDELRNKATQPMKSVLWWLPVEKAFWRQPAGPGSGIRERLEHPVLHVSWXDARA

SEQ ID NO: 524 - protein, 57 aa, Homo sapiens
MPCTCTWRNWRQWIRPLVAVIYLVSIVVAVPLCVWELQKLEVGIHTKAWFIAGIFLL

SEQ ID NO: 525 - protein, 107 aa, Homo sapiens
  SITE (92): Xaa equals any amino acid
MVRYTYSMLSVIGISYAVLTWLSQTLWMPIYPLCVLAEAFAIYQSLPYFESFGTYSTKLPFDLSIYFPYVLKIYLMMLFIGMYFTYSHLYSXRRDILGIFPIKKKKM

SEQ ID NO: 526 - protein, 37 aa, Homo sapiens
MVRYTYSMLSVIGISYAVLTWAQSNTMDANLSFVCSC

SEQ ID NO: 527 - protein, 46 aa, Homo sapiens
MKSQCYSPSYFAFFCLVFFQITSASSQTLRGHVLCRTTLRDSSAYC

SEQ ID NO: 528 - protein, 442 aa, Homo sapiens
  SITE (364): Xaa equals any amino acid
MWFTYLLLYLHSVRAYSSRGAGCCCCWARWRRAVHTARGLRGRPRRQLLRPLRPAQGLAPGRHRLRPAVLPLHLQPLPGLWGGHAEWAALLYYGPFIVIFQFGWASTQISHLSLIPELVTNDHEKVELTALRYAFTVVANITVYGAAWLLLHLQGSSRVEPTQDISISDQLGGQDVPVFRNLSLLVVGVGAVFSLLFHLGTRERRRPHAEEPGEHTPLLAPATAQPLLLWKHWLREPAFYQVGILYMTTRLIVNLSQTYMAMYLTYSLHLPKKFIATIPLVMYLSGFLSSFLMKPINKCIGRNMTYFSGLLVILAFAAWVALAEGLGVAVYAAAVLLGAGCATILVTSLAMTADLIGPHTNSGXFVYGSMSFLDKVANGLAVMAIQSLHPCPSELCCRACVSFYHWAMVAVTGGVGVAAALCLCSLLLWPTRLRRWDRDARP

SEQ ID NO: 529 - protein, 309 aa, Homo sapiens
  SITE (26): Xaa equals any amino acid
  SITE (84): Xaa equals any amino acid
  SITE (111): Xaa equals any amino acid
AADNYGIPRACRNSARSYGAAWLLLXPAGSSRVEPTQDISISDQLGGQDVPVFRNLSLLVVGVGAVFSLLFHLGTRERRRPHAXEPGEHTPLLAPATAQPLLLWKHWLREXAFYQVGILYMTTRLIVNLSQTYMAMYLTYSLHLPKKFIATIPLVMYLSGFLSSFLMKPINKCIGRNMTYFSGLLVILAFAAWVALAEGLGVAVYAAAVLLGAGCATILVTSLAMTADLIGPHTNSGAFVYGSMSFLDKVANGLAVMAIQSLHPCPSELCCRACVSFYHWAMVAVTGGVGVAAALCLCSLLLWPTRLRR

SEQ ID NO: 530 - protein, 243 aa, Homo sapiens
  SITE (26): Xaa equals any amino acid
  SITE (84): Xaa equals any amino acid
  SITE (111): Xaa equals any amino acid
AADNYGIPRACRNSARSYGAAWLLLXPAGSSRVEPTQDISISDQLGGQDVPVFRNLSLLVVGVGAVFSLLFHLGTRERRRPHAXEPGEHTPLLAPATAQPLLLWKHWLREXAFYQVGILYMTTRLIVNLSQTYMAMYLTYSLHLPKKFIATIPLVMYLSGFLSSFLMKPINKCIGRNMTYFSGLLVILAFAAWVALAEGLGVAVYAAAVLLGAGCATILVTSLAMTADLIGPHTNSGLSCTAP

SEQ ID NO: 531 - protein, 148 aa, Homo sapiens
MAGSPLLWGPRAGGVGLLVLLLLGLFRPPPALCARPVKEPRGLSAASPPLARLALLAASGGQCPEVRRRGRCRPGAGAGASAGAERQERARAEAQRLRISRRASWRSCCASGAPPATLIRLWAWTTTPTRLQRSSLALCSAPALTLPP

SEQ ID NO: 532 - protein, 65 aa, Homo sapiens
  SITE (24): Xaa equals any amino acid
MCKGLKNPEGLLLLLLLLLFTDTXNSHCLPPYLSCFLHERQPELQSVCISAAYVLAPLQNPVSSL

SEQ ID NO: 533 - protein, 299 aa, Homo sapiens
  SITE (172): Xaa equals any amino acid
  SITE (174): Xaa equals any amino acid
GGEEEGEEGAEISGLGAGRRSAPIAVGLGFLGVGGRGGSDMEANGSQGTSGSANDSQHDPGKMFIGGLSWQTSPDSLRDYFSKFGEIRECMVMRDPTTKRSRGFGFVTFADPASVDKVLGQPHHELDSKTIDPKVAFPRRAQPKMVTRTKKIFVGGLSANTVVEDVKQYFEXFXKVEDAMLMFDKTTNRHRGFGFVTFENEDVVEKVCEIHFHEINNKMVECKKAQPKEVMFPPGTRGRARGLPYTMDAFMLGMGMLGESGQDRRSPWTGRAMEASTPNWVTYQWGKLLHLSKPQFPCL

SEQ ID NO: 534 - protein, 306 aa, Homo sapiens
  SITE (171): Xaa equals any amino acid
  SITE (180): Xaa equals any amino acid
  SITE (182): Xaa equals any amino acid
  SITE (188): Xaa equals any amino acid
  SITE (208): Xaa equals any amino acid
  SITE (210): Xaa equals any amino acid
  SITE (211): Xaa equals any amino acid
  SITE (218): Xaa equals any amino acid
  SITE (219): Xaa equals any amino acid
MALRLLRRAARGAAAAALLRLKASLAADIPRLGYSSSSHHKYIPRRAVLYVPGNDEKKIKKIPSLNVDCAVLDCEDGVAANKKNEARLRIVKTLEDIDLGPTEKCVRVNSVSSGLAEEDLETLLQSRVLPSSLMLPKVESPEEIQWAVCEETLKVGPQVGLFLDAVRFWRXRLSSHIGAXSXKETLDXLYARQKIVVIAKAFGLQAVXLXXIDFRDGXXLLRQSREGAAMGFTGKQVIHPNQIAVVQEQFSPSPEKIKWAEELIAAFKEHQQLGKGAFTFQGSMIDMPLLKQAQNTVTLATSIKEK

SEQ ID NO: 535 - protein, 64 aa, Homo sapiens; identical to SEQ ID NO: 404

SEQ ID NO: 536 - protein, 26 aa, Homo sapiens
MSFPHASTLPFHKLSDLQHTLPNHQG

SEQ ID NO: 537 - protein, 50 aa, Homo sapiens
  SITE (4): Xaa equals any amino acid
  SITE (10): Xaa equals any amino acid
  SITE (22): Xaa equals any amino acid
  SITE (35): Xaa equals any amino acid
  SITE (39): Xaa equals any amino acid
  SITE (42): Xaa equals any amino acid
VHAXTPFAGXCFDPVSLYWCYXNPGTHCYPTLRGXEQRXPSXRSHIVLRS

SEQ ID NO: 538 - protein, 57 aa, Homo sapiens; identical to SEQ ID NO: 417

SEQ ID NO: 539 - protein, 93 aa, Homo sapiens
  SITE (24): Xaa equals any amino acid
  SITE (65): Xaa equals any amino acid
QVSLPTRLLQMPGMGLDSRFQAWXPSPYLGPQPRAPRPGLQPGPSLRGAEFRESCPRSQKRGREXGRPCPGCRPGGWGLPARLGQPQLQTGPG

SEQ ID NO: 540 - protein, 172 aa, Homo sapiens
  SITE (170): Xaa equals any amino acid
MRGSVECTWGWGHCAPSPLLLWTLLLFAAPFGLLGEKTRQLLEFDSTNVSDTAAKPLGRPYPPYSLADFSWNNITDSLDPATLSATFQGHPMNDPTRTFANGSLAFRVQAFSRSSRPAQPPRLLHTADTCQLEVALIGASPRGNRSLFGLEVATLGQGPDCPSMQEQHSXER

SEQ ID NO: 541 - protein, 131 aa, Homo sapiens
MRGSVECTWGWGHCAPSPLLLWTLLLFAAPFGLLGEKTRQLLEFDSTNVSDTAAKPLGRPYPPYSLADFSWNNITDSLDPATLSATFQGHPMNDPTRTFANGSLAFRSRPFPGPADQPNPLASCTQQTPVS

SEQ ID NO: 542 - protein, 121 aa, Homo sapiens
MCFLMIFTFLVCWMPYIVICFLVVNGHGHLVTPTISIVSYLFAKSNTVYNPVIYVFMIRKFRRSLLQLLCLRLLRCQRPAKDLPAAGSEMQIRPIVMSQKDGDRPKKSDFQLFFHHFYHHQ

SEQ ID NO: 543 - protein, 49 aa, Homo sapiens
  SITE (41): Xaa equals any amino acid
MGAHSFGFQLFMSVSVLWGRLCLYGRFSVITFASPPTTFMXIQCCSHCS

SEQ ID NO: 544 - protein, 484 aa, Homo sapiens
MPRHLSGLLLLLWPLLLLLPPTPAAPGPLARPGLRRLGTRGPGGSPGRRPGSAVPTRAPYSGAGQPGGARGAGVCRSRPLDLVFIIDSSRSVRPLEFTKVKTFVSQIIDTLDIGAADTRVAVVNYASTVKIEFHLQTHSDKQSLKQAVARITPLSTGTMSGLAIQTAMDEAFTVEAGARGPTSNIPKVAIIVTDGRPQDQVNEVAARARASGIELYAVGVDRADMESLKMMASEPLDEHVFYVETYGVIEKLSSRFQETFCALDPCVLGTHRCQHVCVSDGEGKHHCECSQGYSLNADQKTCSAIDKCALNTHGCEHICVNDRTGSYHCECYEGYTLNQDRKTCSAQDQCAFGTHGCQHICVNDRDGSHHCECYEGYTLNADNKTCSVRSECAGGSHGCQHLCVDDGPAAYHCDCFPGYTLTEDRRTCAAIEEARRLVSTEDACGCEATLAFQERASSYLQRLNAKLDDILGKLQADAYGQIHR

SEQ ID NO: 545 - protein, 266 aa, Homo sapiens
  SITE (45): Xaa equals any amino acid
  SITE (47): Xaa equals any amino acid
  SITE (51): Xaa equals any amino acid
  SITE (134): Xaa equals any amino acid
  SITE (183): Xaa equals any amino acid
  SITE (222): Xaa equals any amino acid
  SITE (224): Xaa equals any amino acid
  SITE (255): Xaa equals any amino acid
MPRHLSGLLLLLWPLLLLLPPTPAAPGPLARPGLRRLGTRGPGGXPXRRPXSAVPTRAPYSGAGQPGGARGAGVCRSRPLDLVFIIDSSRSVRPLEFTKVKTFVSQIIDTLDIGAADTRVAVVNYASTVKIEFXLQTHSDKQSLKQAVARITPLSTGTMSGLAIQTAMDEAFTVEAGARGPTXNIPKVAIIVTDGRPQDQVNEVAARARASGIELYAVGVDXAXMESLQDEWPAKPLDEHVFYVETYGVIEKPSXRFQETLLRSWN

SEQ ID NO: 546 - protein, 5 aa, Homo sapiens
VLLIL

SEQ ID NO: 547 - protein, 84 aa, Homo sapiens
KMHFNKNKSILKSFSFVRGNMNEIHSYLKTEYFTAKTLNISRAYHILNTLWSCSYFNIPGSGGQLACLWLRICFHACFLSFFYL

SEQ ID NO: 548 - protein, 67 aa, Homo sapiens
MAPSGPLLLVLLVPLAAARPGPTSVPAGAAACPCGGTSCRGWGAGPTPGRTSTCPHLTCPRAGTGAT

SEQ ID NO: 549 - protein, 14 aa, Homo sapiens
PQGPNDVTAKLLCP

SEQ ID NO: 550 - protein, 6 aa, Homo sapiens
MLLLYL

SEQ ID NO: 551 - protein, 161 aa, Homo sapiens
  SITE (123): Xaa equals any amino acid
  SITE (129): Xaa equals any amino acid
  SITE (145): Xaa equals any amino acid
  SITE (146): Xaa equals any amino acid
  SITE (157): Xaa equals any amino acid
MTTWSCLVAMIVSGVITAVWAVRAAPIWRSQVKQKMRIGKQGNCRPPRCICSALGLLAPWMAVVLSQLSVRCVVSWVQGKPSSPRPRGSAASPAPGATPPTPRKPVSWLGYRENHRPKKPKSXTRCLVXQNWSLPPISKDRTAGXXDTNRTRRSGLXLRLG

SEQ ID NO: 552 - protein, 325 aa, Homo sapiens
  SITE (10): Xaa equals any amino acid
  SITE (136): Xaa equals any amino acid
  SITE (186): Xaa equals any amino acid
  SITE (234): Xaa equals any amino acid
VPPAVCPAGXFCQNQCFTKRQYPETKIIKTDGKGWGLVAKRDIRKGEFVNEYVGELIDEEECMARIKHAHENDITHFYMLTIDKDRIIDAGPKGNYSRFMNHSCQPNCETLKWTVNGDTRVGLFAVCDIPAGTELXFNYNLDCLGNEKTVCRCGASNCSGFLGDRPKTSTTLSSEEKGKKTKKKTXRRRAKGEGKRQSEDECFRCGDGGQLVLCDRKFCTKAYHLSCLGLGKRXFGKWECPWHHCDVCGKPSTSFCHLCPNSFCKEHQDGTAFSCTPDGRSYCCEHDLGAASVRSTKTEKPPPEPGKPKGKRRRRRGWRRVTEGK

SEQ ID NO: 553 - protein, 40 aa, Homo sapiens; identical to SEQ ID NO: 432

SEQ ID NO: 554 - protein, 173 aa, Homo sapiens
MVFLKFFCMSFFCHLCQGYFDGPLYPEMSNGTLHHYFVPDGDYEENDDPEKCQLLFRVSDHRRCSQGEGSQVGSLLSLTLREEFTVLGHQVEGCWARAGGHQQKHLLRPRRGRELWQVPAAGVPPDRGMPTPTRTNPSLSWRASSSRARNRTAGRRAGSTRTFWECWSTPGPC

SEQ ID NO: 555 - protein, 48 aa, Homo sapiens [sequence omitted]

SEQ ID NO: 556 - protein, 10 aa, Homo sapiens
IYQHFSLWLG

SEQ ID NO: 557 - protein, 4 aa, Homo sapiens
MFKM

SEQ ID NO: 558 - protein, 201 aa, Homo sapiens [sequence omitted]

SEQ ID NO: 559 - protein, 392 aa, Homo sapiens
  SITE (251): Xaa equals any amino acid
MAPWPPKGLVPAVLWGLSLFLNLPGPIWLQPSPPPQSSPPPQPHPCHTCRGLVDSFNKGLERTIRDNFGGGNTAWEEENLSKYKDSETRLVEVLEGVCSKSDFECHRLLELSEELVESWWFHKQQEAPDLFQWLCSDSLKLCCPAGTFGPSCLPCPGGTERPCGGYGQCEGEGTRGGSGHCDCQAGYGGEACGQCGLGYFEAERNASHLVCSACFGPCARCSGPEESNCLQCKKGWALHHLKCVDCAKACXGCMGAGPGRCKKCSPGYQQVGSKCLDVDECETEVCPGENKQCENTEGGYRCICAEGYKQMEGICVKEQIPESAGFFSEMTEDELVVLQQMFFGIIICALATLAAKGDLVFTAIFIGAVAAMTGYWLSERSDRVLEGFIKGR

SEQ ID NO: 560 - protein, 63 aa, Homo sapiens [sequence omitted]

SEQ ID NO: 561 - protein, 102 aa, Homo sapiens
MTVRRLSLLCRDLWALWLLLKAGAVRGARAGPRLPGRCCGATCGDAGRGWTFWAQPCPQKLLGQKPGAGGCRGWVLGWVPPRPEEPCSLAGKVCTGLARWMV

SEQ ID NO: 562 - protein, 53 aa, Homo sapiens
  SITE (41): Xaa equals any amino acid
MCKAVCKHRLRLFAVSSFSLGLGWVCVLVLMLWPVRLSLAXRPVQLQQRRSHC

SEQ ID NO: 563 - protein, 472 aa, Homo sapiens; identical to SEQ ID NO: 441

SEQ ID NO: 564 - protein, 178 aa, Homo sapiens
SIYSPHTGIQEYQDGVPKIPTACITVEDAEMMSRMASHGIKIVIQLKMGAKTYPDTDSFNTVAEITGSKYPEQVVLVSGHLDSWDVGQGAMDDGGGAFISWEALSLIKDLGLRPKRTLRLVLWTAEEQGGVGAFQYYQLHKVNISNYSLVMESDAGTFLPTGLQFTGSEKARASWRRL

SEQ ID NO: 565 - protein, 199 aa, Homo sapiens
  SITE (142): Xaa equals any amino acid
MKLGCVLMAWALYLSLGVLWVAQMLLAASFETLQCEGPVCTEESSCHTEDDLTDAREAGFQVKAYTFSEPFHLIVSYDWLILQGPAKPVFEGDLLVLRCQAWQDWPLTQVTFYRDGSALGPPGPNREFSITVVQKADSGHYXCSGIFQSPGPGIPETASVVAITVQELFPAPILLLQGWKDSAKQGGSPQNSRSPQLQK

SEQ ID NO: 566 - protein, 2 aa, Homo sapiens
SW

SEQ ID NO: 567 - protein, 32 aa, Homo sapiens
CLETFWSLYLGGWGMVGCVCYWHPVNRSQGCR

SEQ ID NO: 568 - protein, 283 aa, Homo sapiens
MYLSALQSLIPSLFALVLQNAPFSSKAKLHGEVPQIEVTRFPRPMSPLQDVSTIIGSREQLAVLLQLYDYQLEQEGTTGWESLLWVVNQLLPQLIEIVGKINVTSTACVHEFSRFFWRLCRTFGKIFTNTKVKPQFQEILRLSEENIDSSAGNGVLTKATVPIYATGVLTCYIQEEDRKLLVGFLEDVMTLLSLSHAPLDSLKASFVELGANPAYHELLLTVLWYGVVHTSALVRCTAARMFEVCQHMPLLVSIIMIFFFLRRRREFFLIKRLCISKKKKKKK

SEQ ID NO: 569 - protein, 286 aa, Homo sapiens
  SITE (204): Xaa equals any amino acid
  SITE (224): Xaa equals any amino acid
  SITE (228): Xaa equals any amino acid
  SITE (264): Xaa equals any amino acid
  SITE (271): Xaa equals any amino acid
MYLSALQSLIPSLFALVLQNAPFSSKAKLHGEVPQIEVTRFPRPMSPLQDVSTIIGSREQLAVLLQLYDYQLEQEGTTGWESLLWVVNQLLPQLIEIVGKINVTSTACVHEFSRFFWRLCRTFGKIFTNTKVKPQFQEILRLSEENIDSSAGNGVLTKATVPIYATGVLTCYIQEEDRKLLVGFLEDVMTLLSLSHAPLDSLKXSFVELGANQAYHELLLTVLXYGVXHTSALVRCTAARMFELLVKGVNETLVAQRVVPALHXLSPVDPXNLCQDCHNFQPLGLF

SEQ ID NO: 570 - protein, 45 aa, Homo sapiens
  SITE (43): Xaa equals any amino acid
MQAPLQDCGRSVSLRLACVLAPLTTSSRGCHLQLPQDKGKARXDS

SEQ ID NO: 571 - protein, 305 aa, Homo sapiens
MGILLGLLLLGHLTVDTYGRPILEVPESVTGPWKGDVNLPCTYDPLQGYTQVLVKWLVQRGSDPVTIFLRDSSGDHIQQAKYQGRLHVSHKVPGDVSLQLSTLEMDDRSHYTCEVTWQTPDGNQVVRDKITELRVQKHSSKLLKTKTEAPTTMTYPLKATSTVKQSWDWTTDMDGYLGETSAGPGKSLPVFAIILIISLCCMVVFTMAYIMLCRKTSQQEHVYEAARAHAREANDSGETMRVAIFASGCSSDEPTSQNLGNNYSDEPCIGQEYQIIAQINGNYARLLDTVPLDYEFLATEGKSVC

SEQ ID NO: 572 - protein, 72 aa, Homo sapiens
MKFVPCLLLVTLSCLGTLGQAPRQKQGSTGEEFHFQTGGRDSCTMRPSSLGQGAGEVWLRVRLPQHRPDLLV

SEQ ID NO: 573 - protein, 121 aa, Homo sapiens
MGLWLGMLACVFLATAAFVAYTARLDWKLAAEEAKKHSGRQQQQRAESTATRPGPEKAVLSSVATGSSPGITLTTYSRSECHVDFFRTPEEAHALSAPTSRLSVKQLVIRRGAALGAASAH

SEQ ID NO: 574 - protein, 509 aa, Homo sapiens
MTWRMGPRFTMLLAMWLVCGSEPHPHATIRGSHGGRKVPLVSPDSSRPARFLRHTGRSRGIERSTLEEPNLQPLQRRRSVPVLRLARPTEPPARSDINGAAVRPEQRPAARGSPREMIRDEGSSARSRMLRFPSGSSSPNILASFAGKNRVWVISAPHASEGYYRLMMSLLKDDVYCELAERHIQQIVLFHQAGEEGGKVRRITSEGQILEQPLDPSLIPKLMSFLKLEKGKFGMVLLKKTLQVEERYPYPVRLEAMYEVIDQGPIRRIEKIRQKGFVQKCKASGVEGQVVAEGNDGGGGAGRPSLGSEKKKEDPRRAQVPPTRESRVKVLRKLAATAPAFPQPPSTPRATTLPPAPATTVTRSTSRAVTVAARPMTTTAFPTTQRPWTPSPSHRPPTTTEVITARRPSVSENLYPPSRKDQHRERPQTTRRPSKATSLESFTNAPPTTISEPSTRAAGPGRFRDNRMDRREHGHRDPNVVPGPPKPAKEKPPKKKAQDKILSNEYEEV

SEQ ID NO: 575 - protein, 554 aa, Homo sapiens
MGPRFTMLLAMWLVCGSEPHPHATIRGSHGGRKVPLVSPDSSRPARFLRHTGRSRGIERSTLEEPNLQPLQRRRSVPVLRLARPTEPPARSDINGAAVRPEQRPAARGSPREMIRDEGSSARSRMLRFPSGSSSPNILASFAGKNRVWVISAPHASEGYYRLMMSLLKDDVYCELAERHIQQIVLFHQAGEEGGKVRRITSEGQILEQPLDPSLIPKLMSFLKLEKGKFGMVLLKKTLQVEERYPYPVRLEAMYEVIDQGPIRRIEKIRQKGFVQKCKASGVEGQVVAEGNDGGGGAGRPSQGSEKKKEDPRRAQVPPTRESRVKVLRKLAATAPAFPQPPSTPRATTLTPAPATTVTRSTSRAGNRCCKTYDHHWLSHHAEALDPLTLPTGPLQPLRVITARRPSVSRESLPSIPGRISTGRGHRQPGGPARPTSLESFTNAPPTTISEPSTRAAGPGRFRDNRMDRREHGHRDPNVVPGPPKPAKEKPPKKKAQDKILSNEYEEKYDLSRPTASQLEDELQVGNVPLKKAKESKKHEKLEKPEKEKKKKKKK

SEQ ID NO: 576 - protein, 23 aa, Homo sapiens
MLALLGLLAGTEHPPGPQGPGPS

SEQ ID NO: 577 - protein, 25 aa, Homo sapiens
MVNIFGFVSCIVFVVAVQLCYMKQP

SEQ ID NO: 578 - protein, 122 aa, Homo sapiens
  SITE (92): Xaa equals any amino acid
  SITE (100): Xaa equals any amino acid
  SITE (109): Xaa equals any amino acid
  SITE (116): Xaa equals any amino acid
MLALTLAKADSPRTALLCSAWLLTASFSAQQHKGSLQVHQTLSVEMDQVLKALSFPKKKAALLSTAILCFLRTALRQSFSSAWNPGALKGPXTAATKDTXLTSLRMSKXGPGHWAXKTSWCK

SEQ ID NO: 579 - protein, 216 aa, Homo sapiens
  SITE (6): Xaa equals any amino acid
  SITE (18): Xaa equals any amino acid
CFPWGXALRQKLFPSALXALVPSGAQPLPATKDTVLAPLRMSQVRSLVIGLQNLLVQKDPLLSQACVGCLEALLDYLDARSPDIALHVASQPWNRFLLFTLLDAGENSFLRPEILRLMTLFMRYRSSSVLSHEEVGDVLQGVALADLSTLSNTTLQALHGFFQQLQSMGHLADHSMAQTLQASLEGLPPSTSSGQPPLQDMLCLGGVAVSLSHIRN

SEQ ID NO: 580 - protein, 127 aa, Homo sapiens
MLPLLIICLLPAIEGKNCLRCWPELSALIDYDLQILWVTPGPPTELSQSIHSLFLEDNNFLKPWYLDRDHLEEETAKFFTQVHQAIKTLRDDKTVLLEEIYTHKNLFTERLNKISDGLKEKEPHPSP

SEQ ID NO: 581 - protein, 164 aa, Homo sapiens
  SITE (126): Xaa equals any amino acid
MLPLLIICLLPAIEGKNCLRCWPELSALIDYDLQILWVTPGPPTELSQSIHSLFLEDNNFLKPWYLDRDHLEEETAKFFTQVHQAIKTLRDDKTVLLEEIYTHKNLFTERLNKISDGLKEKGAPPXSMNAFPAPSPTCTPEPLGSVCLPSTSVSLPSHLPGSLQ

SEQ ID NO: 582 - protein, 71 aa, Homo sapiens; identical to SEQ ID NO: 466

SEQ ID NO: 583 - protein, 140 aa, Homo sapiens
  SITE (136): Xaa equals any amino acid
MASLGLQLVGYILGLLGLLGTLVAMLLPSWKTSSYVGASIVTAVGFSKGLWMECATHSTGITQCDIYSTLLGLPADIQAAQAMMVTSSAISSLACIISVVGMRCTVFCQESRAKDRVAVAGGVFFILGSLLGFIPXAWNL

SEQ ID NO: 584 - protein, 86 aa, Homo sapiens
  SITE (33): Xaa equals any amino acid
  SITE (43): Xaa equals any amino acid
RRFYSPLVPDSMKFEIGEALYLGIISSLFSLIXGIILCFSCSXQRNRSNYYDAYQAQPLATRSSPRPGQPPKVKSEFNSYSLTGYV

SEQ ID NO: 585 - protein, 42 aa, Homo sapiens; identical to SEQ ID NO: 470

SEQ ID NO: 586 - protein, 76 aa, Homo sapiens
INFTYKRLSLDFIYIYMCVCVCVCVCVCVCVYLKRTCASIKGNKMREYIIDFVKSKYLNYGFSIFKNSCSFCTYFF

SEQ ID NO: 587 - protein, 53 aa, Homo sapiens
MVTFINATLWIAVFSYIMVWLVTIIGYTLGIPDVIMGITFLAAGQVFQTAWPA

SEQ ID NO: 588 - protein, 169 aa, Homo sapiens
  SITE (6): Xaa equals any amino acid
  SITE (39): Xaa equals any amino acid
  SITE (44): Xaa equals any amino acid
  SITE (71): Xaa equals any amino acid
MVTFIXATLWIAVFSYIMVWLVTIIGYTLGIPDVIMGIXFLAAXTSVPDCMASLIVARQGLGDMAVSNTIXSNVFDILVGLGVPWGLQTMVVNYGSTVKINSRGLVYSVVLLLGSVALTVLGIHLNKWRLDRKLGVYVLVLYAIFLCFSIMIEFNVFTFVNLPMCREDD

SEQ ID NO: 589 - DNA, 15090 bp, Homo sapiens
acgttccctacttcctgtgctcttgcggagacgcgcgcgtcggggtttaacgcgtttctgggccgccgtaagcccggcctaggggcagctttgactcgagagccggctataggcgcatggaaggttccctggaacgggaggcgccagcgggggcgctggccgccgtgctaaagcacagctcgacgttgccgcccgaaagcacccaggtccggggctacgacttcaaccgcggtgtgaattaccgcgcactgctggaggccttcggcaccaccggcttccaagcaaccaacttcgggcgcgctgtacagcaagtcaatgccatggtgaggaccgggcggaatttctagggacgcggaggggcgtggcttgtagaaccaacgcggtactagacgggggcagcgtttccagtggaggggatatgtcttttatttgagttgcccaatagttggaggaaggcgggacctattctgggcgggagtttctgtcctgggaaggggattttgcactctggtagttacatgctggtacggtaacctgaggaggcgaggactgattcttggtgtgggggcgggttctaggtacatttaaagctttctggaatgggcggagcctggggcaagacaaattaagggaggatatgggaggaggagcctaagtctgggcggttcttgaatttagatttgcttttcccagcggggaagggaccggatctgaaaggagatgctctctgattcctaaaagggtgggggctggctgggcgcggtggcgcatgcctataatcccagcattttgggaagccgaggcgggtggatcaagagaagaggagttcgagacaagcctggccaacatggtgaaaccctgtctctactaaaatgcaaaaaattagccgggcatggtgttgcgcgcctgtagtcccagctactcgggaggctgaggcaggagaatcgcttgaacccgcgaggtggaggttgcagtgagctgagattgcgccactgcactccagcctggtgacagagcgatactctgtctcaaaaaaaaaaaaaaaaaaaggccgggcacggtggctcatgcctgtaatctcagcattttgggaggccgaggcgggcggatcacctgaggtcgggagttcgagaccagcctgaccaacatggagaaaccccgtctctactaaaatgcaaaaaattagccgggcatggtggtgcgcgcctgtagtcccagctactcgggaggctgaggcaggagaatcgcttgaacccgggaggtggagcttgcagtgagccgagatcgcgccattgcactctagcctgggtaacaagagtgaaactccgtccaaaaaaaaaaaaaaaagggtgggggcaaatcctgaacgtgtgtcttgagatctggtctgggaaggggcagagtttacacaggagatgttccttggtcccctgtagaactggtcctgtatccctgaatgtgcagggcctggggtgaaatctgtttctggagcccacctggagtcctgagtctgggatttaaggccagtgcttaacttgacttggcccttactcacagatcgagaagaagctggaaccactgtcacaggatgaagaccagcacgcggacctgacccagagccgccgcccacttaccagctgcaccattttcctgggatatacatccaacctcatcagttcaggcatccgtgagaccattcgctaccttgtgcagcacaacatggtggggacctggtgaggccgtggccttggcctctgggtcaatgggcaatgcagttattgatcgtttaagtgagatgggcagataggggtctgttataagcagaggaatagaatcaagttttgttttgtagcagagctccctcataagagtcactggacaaggatgaggttagaagttctgcccagaatgagggcaggggcttccttcttgggccaaattcactgccttgtggctgcaggtggacgtattggtgaccacagctggcggcgtggaggaagacctcatcaagtgcctggcgcccacatacttgggcgagtttagcctcagggggaaggagctccgggagaacgggatcaataggtgagaaccctgagtggtgttgggcaggggagctggaccaagggtcctggggcctgatgcctacatgcctcctgttctcaggatcggaaacctgctggtgcccaatgagaattactgcaagtttgaggactggctgatgcccattctggaccagatggtgatggagcagaacacagaggtggggctggggcaacctggaggggccagttcagtgggagtcaggggaggcatggcctgaaggtcacatcctctcctagggtgtaaagtggacgccttctaagatgatcgcccggctgggcaaggagatcaacaacccagagtccgtgtattactgggcccagaaggtgaggacctaagcgggagcaaagtagccagactttggcatgtgttaacttatttcatctttccagcctcctggggattcagtactgttattctcagcatcctcactcttagatgaggagactcaaacacagataggcgtggtaattttttttttttttgagacaggatcttgctctgtcacctaggctggagtgcagtggtgtgatcacagctcattgcagcctcaacctcctggggccaagcagtcctcccacctcagcctctcgagtagctgggaccacaggcacatgccatcatgcccagctaattttaaaaattttttgtagagatgggggtctccctgtgtttcccaggctggtcttgaactcctggcgtcaggcagtcctcccaccttggcctcccaaagtgctgggattacaggcgtgagccactgtgcccagccaggctaggtaattttgtctgaagtcacacagataactagtggggcctcagcatccttatgctcctcccagactatctctggaacagtagaggcaacacttagcaactctcctggggcctggctcagggtcccacactcccagatgctataaaataagagctacccactccctttaattagagaatcagaacctgaaaaaaaaaaaaaaaaagctacatagtctttttttttttttttttttttttgagacagagtcttgctctgtcgcccaggctggagtgtaatggtgtgatttcagctcactgcaccctccacctcccaggttcaagtgattctcccgcctcaccctcctgagtagctgggactataggcacccaccatcatgcccggccaatttttgtatttttctacagatggggtttcaccatgttggccaggctggtcttgaactcctgacctcaagtgatccacccgccttggcctcccaaagtgctgggattacaggggtgagccaccacacccagcctacttactctttcttttttacgagacagggtctcattctgtttcccaggctggagtgcaatggcacaataatggctcactgctgtcttgagcttctgggctcagtcgattctcctgcctcagcctgctgagtagctgggactacaggtgcgtgccaccatgcctggctaattgtttttgtagagatgggaactcaccatgttgcacaagctggctctttttttttttttgagacggagttttgctcttgttacccaggccagagtccaatggcgcaatcttggctcacagcaacctctacctcctgggttcaagcaattctcctgcctcagcatcaagttcccaagtagctgggattataggcatgtgccaccacccctggctaattttgtatttttagtagaggcagggtttctccatgttggtcaggctggtgtcgagctcctgacctcaggtgatccacccgcctcggcctcccaaagtgctgggattacaagcgtgagccaccgcgcccggccacaagctggctctttaaaaaagaattagacggccgggcacggtggctcatgcttgtaatcccagtactttgggggctgaggcgggtggatcacctgaagtcaggagttcaagaccagcctggccaacatggtggaaccctgtctctactaaaaaaacaaaatgcaaaattagctgggcatagtggcatgcgcctgtaatcctagctactcgggaggctgaagcaggagaatcactggaacccaggaggcagaggttgcagtgagctgagatagtgccattgcactccagcctgggcaacgagtgaaactccgtctcagggaataaaaaaaaagagagagaaacagctcagcaagctaagaataggctggttctttatgtgccaggcactatactaagtgttttctgtgggttttctcatataggcctcatctgtgagaggtgtttctgttatgcttataattgaggaaacagtcctagagaaattaggcaccccatccacagtcagatagtcatatagccagcatggagacgaggctctgagctccagccactgtcctgtcatgttctctgcagaaccacatccctgtgtttagtcccgcacttacagacggctcgctgggcgacatgatcttcttccattcctacaagaacccgggcctggtcctggacatcgttgagggtgaggcgctagggccacagaggagaggggaaggagggctggctgagtccaaggcctgacttcggcgctcttcccccagacctgaggctcatcaacacacaggccatctttgccaagtgcactgggatgatcattctgggcgggggcgtggtcaagcaccacattgccaatgccaacctcatggtgagtgggggtggcgcttcggcccactctgcagacatgctgtgtggtgggcctatgccatgtgctgggtagacagcatgaactagacaggccaggatccctgctccccgggactgatgttctagtaggggagatagcaaacaagtgacatccacgtcagggggcagtcattgctacggggaatactaaatgatggcatgagaagagaaaggggtgctgtccaacaagaggttttggaaggaggcttctggaagtgtgagctgggagcaggggtttggggaggcatctcccaggagctatgtggttgtctcccgtgccaggagtttgtgctgctgtactagcattgagcttctggattgcaaagttcccaggagagggaacagccattgcaaaggctctggggcgcctgaagtaatccaggaacagctgggtacctggtgaggggaaggtggagtggtgagggccaggaggtgatgcagggaggtgccacagggagcctgctgggccctgtgggctgaggcggggctttggcttttgcactgagagaagtgggagaggacttgactcgggttcccatgctccccctggtggccatgtggtgaacagatggtggcaggtgagtgagaactccagtccaggacagtggtgaccatgcagggatcaggaggcaggcggtggttggatttggagggcttctgaagatagagttgctggcagctcctgccttgcagatggggcagggttgttgacacctggctgttgggtctggggaaacacagccatcgttgcccagcagctctagtgaccccagacattgacatgggccctgtctgggagcgaatgtctgtgaagggcttccttcatctgggacacacctctcagcctgtttggctacggtgtcctccctctgtgtctgtctcctgtgactggctgactgggcccaccgtgcccccgcctccccacagcggaacggggccgactacgctgtttacatcaacacagcccaggagtttgatggctctgactcaggtgcccgaccagacgaggctgtctcctggggcaagatccgggtggatgcacagcccgtcaaggtaagcgctggctgggtggggcatagggtctctgggacgatgagtgtgggtcccatggcttacccaggttcccccctacccaggtctatgctgacgcctccctggtcttccccctgcttgtggctgaaacctttgcccagaagatggatgccttcatgcatgagaagaacgaggactgagcggctgcggtcccaggaaggtcttaccccctcttctatttattaatttgcagacccagcccctcccctactttttggtcagctacgtctctagaataagatggtatctgaagtccttccatgtctgtgtctcggtccttggtcctgttggtgggtcccctggcttcagcctgctccatcctctgcctcataggcctcctctcgccagcactggacgctgcctcccatggcggtcagcaggcagggctctgttgggtggtaggccagcgactgcaccacaccggaacccacaggcagggccagagccagcgcaccctgtggagcgaggggtagggagtggttatctgtggctgggctgtaccctggtttctgaggtccctgggcaccccccatctcagtcctgcctgaagccctcagtcacctctccccgaccttcagccacctgcctctaattgcctcctagacactgcaaaattaatctacctcagactgagcccctcagtagctctgtcctaccaggtgttcaggccgcaagtcttgggagcctcttattgattttttattttttaaaatagcagagatggggtcttaccatgttgcccaggctggtctcgaactcctggcctcaagtgatcctcctgccttggcctcccaaagtgctaggactacaggtgtgagccaccatgcctggctttgggagtctttttctttttctgtttttttttgagatggagtcttgctctgtcgccaggctggagtgcagtggcgccatctgggctcactgcaacctccgactccctagttcaagcgattctcctgcctcagcctcccgagtaggtgggattacaggcacgcgctaccatgcccagctaatttttgtatttttagtacagatggggtttcaccatgttggccaggatgatctctatctcctgacctcgtgatccacccccctcggcctcccaaagtgctgggattacaggtgtgaaccaccatgcctggccgggagtctttttcttgtaccacatgttcctctatcagttattcctcttggctctgcttctagaccatgtccagagactgctgattttctgccactaccatgtttggagcatgccttgctcacagcttgcctgttccctgccaccagctgggctccatcctgtccatttggcagccccaatgatccccacttcccctggtcccaacacaatgtaaacagttcctcaagcaagccatgcttcctctttccaccttgaaaatgtcccttgatgtgcctgccctccaaggcaacttctgttctactgggcccataagaaataggtggaacattcttgctaccttagttcctaaagcaagagcttgtccgccaagtcttcagggcccccccggttccctccatcctcttatgggccttagttcccctggccaagcccagcgctgatgtctcctttgccgagattcccccggctctgaccccactacaccaggatggtctgtttctggcctgactccccaccaggctgggacatgtcaaggacagggctcagggcttgaaaccatgcacagggatgctaagatgtagctccagtttcttgaatgactgcagccctatctcacccaaggttagacatggccgtcggctcccccttgcccaggggtcagtgccagttgctcggcctggcatctgcagcccagcctgaccccggatcttgccgcacctgccgccaccctgaagcctttgtttcctgactgatgcatgcgcaggctacacctcttaacatatgctgttccctttgcctggaatgcccttcctgcctcatcttctctctagcccaagctgggcacggtgtctcaggcctgtaatcccagcactttgggaggccgaggcgggtgaatcacttgaggtcaggagtttgagaccagcctggccaacatggtgaaaccctgtctctactaaaaatacaaaaattagccaggtatggtggtaggggcctgtaatcccagctactcaggaggctgagacatgagaatcacctgaaccctggggggaagaggttgcagtgagctgagatggcgccactgcatttgcctgggcaatagtctcaaaaaaagaaaaaagggccgggtgtggtggcttacgcctgtaatcctagcacttgggaaggctgaggtgggtggatcatgaggtcaggagtttaagaccagcctgaccaacatagtgaaaccctgtctctactaaaaatacaaaaattagctgggtgtggtggcacgcacctataatcccaactactcaggagactgaggcaggagaatcgcttgaacttgggaggcggagtttacagtgagccaagattgcgccactgcactctagcctgggcgacagagcaagacttgtctcaaaaaaaaaaaaaaaaaaaaaaaaaagatcctagccttcaggccctggagtgactgaggtaaggacagggctgagatggggcaggcatctaggtatgaagtagggctgggggcacctcacctccaccaggtcccagaagaacaccttcccgtcctcagaacagctgaccacatgtgtgtcacgctcgctcaggcagcagtccagcttgtattcctggttcttatggcccttgtacctaagggtggacaggatcggggggcttggtcctctccaggggtgggagaggagggaaggggatccccacgaccacaaggactcactcgcccagcagctcccctgtgtctttgtccaggagccgcaatgtggagtccaggctggacaccagggtgcactgcccatcccggctgaagcaggtgcaggtgatggggccttgggggaagggtgggtaggtgagtgagggtggggtgcccctggttggccccccatcttccctgcctgtcccacatccccagccacactcactgcccacgtagtctgagaagagctgccccatccttaggtcatagcgtctcacgcggccatccacggagctgcaggagagggtagatccagcgggaaccttgactacactcacatggctccaggcagccctgtgccttcccagcccagtgggcctgctcttccagtgcacaggagtggaattctgaagctctggccttgagactcaggcccagggccaattacgtcctactccatcatttccaagacccacaccccctttccaagcccttggagtccttctgattcccccttttcttccttttgtttgagacagagttttgctcttgttgctcaggctggagtgcaatggcatgatcttggctcaccggaacctctgcctcccgggttcaagagattctccttcctcagcctcccgagtagatgggaatacaggcatgcaccaccacgccctgctaattttgtatttttagtagagacggggtttctccatgttggtcaggctggtctcgaactcccaacctcaggtgatccgcccacctcagcctcccaaagtgctgggattacaggtgtgagccaccccacctggcccaattcccccttttcctgcattctccagctcctcctcctcagtactcagtcccaccactttccccactacccagcaccagcatctagactgttctggtctccctgcaccccccacagccaccagagggagcacttttcaaagtacagttgacccatgaacaacacggtttgaactgaacgcgtccacttatatgtggattttcttctgcctctatcagctgtgagacaccaagatcaatccctcctcttcctcctcctctgctttctcaacacgaagatctttatgacgatctcttcacttccacttaatgaatagaaaatatattttttccaccaggcgcggtggctcacgcctgtgattccagctctttgggaggccagggcaggtggatcacgaggtcaagagatggagaccctcctggccaacatggcgaaaccccgtctctactaaaaatacaaaaattagctgggcgtggtggcacgcgactgtagtcccagctactagggaggctgaggcaggagaatcgcctgaacctagaagttagaggttgcagtgagccgagatcacgtcactgcactccagcctggcaacagagcgagactgcgtctcaaaaaaaacaaaaattcttccttatgattatttttatgtatttatttatttaatttatttacttattttgagacggagtcttgctctatcgcccaggagtgtagtggtgcgatgtcggctcacagcaagctctgcctcctgggttcactccattctcctgcctcagcctcctgagtagctgggactacaggcgcctgccactatgcccggctaattttttgtatttttagtagagacggggtttcaccgtgttagccagaatgatctcgatctcctgacctcatgatccgcctgcctctgcctcccaaagtgctgggattacaggcatgagccacagcgcccggcctatttttatttatttttagaaatcattttatctttttttttttgagatggagtctcactttgtcgcccaggctggagtgcagtggcacaatctcggctcactgcaacctccaactcccgggttcaggcgattctcctgcctccgcctcccgagtggctgggattacaggctcccgtcaccacacctggctaatttttgcatttttagtagagacggggtttcaccatgttggccaggctgatctcaacctcctgacctcaagtgatctgcccaccttggcctcccaaagtgctgggattacaggtgtgagccaccgtgcccggccagattattattattttgtagacagtctgtctttcacccagcatggagtgcaatggtgcctcgaactcttggactcaagtgatccttccacttcagcctcccaagtagctgggattacagctgtgtgccactgtgcccagctgagagtaggttttaatctgagcatgggggcagctatgattccccgtagcacctggggtgagaccaggtcctggctccactcaccctgccaggatctcgtggtctgacaccttcacactggacacgccatctctggcctcatccagcgtctgcactggctcaggcctccgtgagcggcaatcccaacagcggatactggaatcaatagagcctgtgaggccagcatgatggtgaggtcaggtttggagggggagggcagcaccctgggcccccgtgcttaggccccagactcaccggacaggataactgtggcctcttcattaaactgcaccgtgttcaccttctgagaaagttattgccactcagaggaggctggactttggaggactgggataaaggcagggttcccagtgtcggttaaagcaagggcgaaggggaggtgaaaggttttgggggaacagcaaggacaggggttggtgactgcctagcctggcatgcggagtgggggatcgtcatctggggaagggatccttacggtgtaatgggggtggccgtgtcaccacctatgcgctaatacgggtcccctccactcaaatgagggtctccaggctttcactcacccctgcgtggccccggaatttgcgcacgacctgccctgatgccacatcccacagaaccaccgccttgtccccgccgccggagcagagactactgttgtcaaaggagctggagtaaaggaggaggaggatcagcatcgacctcggatcccagcctcagcgctcccatcccagcctggtccccggctcacccggccgcatccagcacctcgtagccgtggccgctgtacgtccgcagcagcgtcccccgaagcgggttccacagcttcagcgtcttgtcactgccgcacgtcaggcagtaattgccatccactggggaacaccaggcgggggttactgggccgtcgatctcaggaggcgggaggaggacccggaatgaagacgaaggcgctcaccattaaatcgtacggctcgcactgccccctgcccgcagtccagcgtcttcaaccgtttctgcggcagctctggaggccgcggctttggctcagggaaagccatgctcccaggactccttccttgcagccttaaatcggtctgtacggaaaattccgcgccttagaaacccacgcttgggtgtaaccttattattgttcttcctgacctacttcctgtttatcacttccgggttcatcattttggcatttcggtgatcgggttggaactattgaagcccgctttcaggttcttttccccattttccctttgaaaggaagacttctggcttctcctaaatctccgttctctgggtaaggggagtccaagcctctgtcatgaggaacggaaatgcgagggcctcgggtgttactctaaaatccgccctcagcttgcacgccggaagctgcgattcctgcagcggaagaggcgtgatctggccttcgactcgctatgtccactaacaatatgtcggacccacggaggccgaacaaagtgctgaggtgaggaccccagcgtcgtgggcacgggttcgggttgtgggtgtggatcggggccctgggaagcgcctgtctatcccgggggcaggacctgagcgcccctgaccctcgagcctgtcgcaggtacaagcccccgccgagcgaatgtaacccggccttggacgacccgacgccggactacatgaacctgctgggcatgatcttcagcatgtgcggcctcatgcttaaggtgggcggggttgagcttctatgggtgtagttggacctgagaacgaggcccgggggcgggtttggaatgaagcggggtgtcttgtcattgctgatggggcgggacctgagatcggccgggagtggggctgcgatgacgctgggccgagaaagccccagtctttggtgaagtcaaggattcgagtcaggttggggatgtggcagattggtctgcgagtggggccaggctttgaagcaacttggagaggagttgtggaaaaagggcagggtcttaagcatgtgggatgtcagagtctctcttggtcctgagagacgcaggccagacagtaggactagaaaccacgtatctagagtatgccatgagcaggtgggactgaggaattccgggtggggcaaggtcccagctgcatcagatggaatcagtgggcatgatctggtgtctggaaaggtggcttcggggactcattgttgtgcctttcactaacctgcccacccacttacctttccctagctgaagtggtgtgcttgggtcgctgtctactgctccttcatcagctttgccaactctcggagctcggaggacacgaagcaaatgatgagtagcttcatgtgagacttgccctacagaacaagtgactcttgagtaaggggtggggggaccccagcctggccatcctagactgacacctctctcctgtctcaggctgtccatctctgccgtggtgatgtcctatctgcagaatcctcagcccatgacgcccccatggtgataccagcctagaagggtcacattttggaccctgtctatccactaggcctgggctttggctgctaaacctgctgccttcagctgccatcctggacttccctgaatgaggccgtctcggtgcccccagctggatagagggaacctggccctttcctagggaacaccctaggcttacccctcctgcctcccttcccctgcctgctgctgggggagatgctgtccatgtttctaggggtattcatttgctttctcgttgaaacctgttgttaataaagtttttcactctggctgtcagcctcttctgttcagtggggtgttcctcctacctggcgggaagggctctagccccataggcctggtgtggggccccagtctggaggcttctggctgttcatttgcttacttcataaaccttgtgtcttaagtcaggtgctagggacaagacagtgacttctgccctctggcaactcaccagatggccctgctgacctagataatctaggctttggtttccttttttttttttcctttttaagaaagaaaatggtcttgatctgtcatgcaggctgagtgcagtggcacaatctatgttcactgcagcctcaaactcctgggctcaagcaatcctcccacctcagcctgccacgtaactgggaccacaaatgcgtgctaccatgcccagttaattcttgttttttttgagacagagttttgctcttgttgcccaggctggagggcaatggcatgatcttgatctcggctcactgcaacctccgcctcccaggttcaagtgattctcctgcctcagtctcccaagtagctgggattacaggcatgtgccaccatgcccagctaatttttgtatttttacattttgtgtaaaattacaaattttgtgttttcaaacccgtctctacaaaacaacccatgttgcccaggctggtctcaaactcccaggcccaagtgattcaccagcctggccctcccaaagtgctgggattgcaggcttgagccactgcgcctgccctgggctttgttttcttatcagagaatgaactggtaggaattgggaaaggcatgaaagactcggggtccttccccacttgtcagaccctcttttctctccggaacacccagggatccttctcaaccaggctggatcccatccctggtactccaggggtatttacccaacgtcccaatccccacagtataggactcttcatcagatcctcctcttaggcaagctaggtccttccaggaccctagcgctgaaggtccatgggacggacaccctggattcccatggacacactacaccggctaggaaaacccggcccccttaggaaaagcacttctgctcctaccggcattaagaggcattccgtcttggaattccggcattaagaggcattccgtcttcatagcccgtgagacgccagtgtcacctttagcccaaccagtgccctgagggtggcattttcctaccttcctgtaacgacccccgggattgcccagggctacagcctctctcccgtgagcctccagaccgcgccctggccccgcc

SEQ ID NO: 590 - DNA, 15090 bp, Homo sapiens
acgttccctacttcctgtgctcttgcggagacgcgcgcgtcggggtttaacgcgtttctgggccgccgtaagcccggcctaggggcagctttgactcgagagccggctataggcgcatggaaggttccctggaacgggaggcgccagcgggggcgctggccgccgtgctaaagcacagctcgacgttgccgcccgaaagcacccaggtccggggctacgacttcaaccgcggtgtgaattaccgcgcactgctggaggccttcggcaccaccggcttccaagcaaccaacttcgggcgcgctgtacagcaagtcaatgccatggtgaggaccgggcggaatttctagggacgcggaggggcgtggcttgtagaaccaacgcggtactagacgggggcagcgtttccagtggaggggatatgtcttttatttgagttgcccaatagttggaggaaggcgggacctattctgggcgggagtttctgtcctgggaaggggattttgcactctggtagttacatgctggtacggtaacctgaggaggcgaggactgattcttggtgtgggggcgggttctaggtacatttaaagctttctggaatgggcggagcctggggcaagacaaattaagggaggatatgggaggaggagcctaagtctgggcggttcttgaatttagatttgcttttcccagcggggaagggaccggatctgaaaggagatgctctctgattcctaaaagggtgggggctggctgggcgcggtggcgcatgcctataatcccagcattttgggaagccgaggcgggtggatcaagagaagaggagttcgagacaagcctggccaacatggtgaaaccctgtctctactaaaatgcaaaaaattagccgggcatggtgttgcgcgcctgtagtcccagctactcgggaggctgaggcaggagaatcgcttgaacccgcgaggtggaggttgcagtgagctgagattgcgccactgcactccagcctggtgacagagcgatactctgtctcaaaaaaaaaaaaaaaaaaaggccgggcacggtggctcatgcctgtaatctcagcattttgggaggccgaggcgggcggatcacctgaggtcgggagttcgagaccagcctgaccaacatggagaaaccccgtctctactaaaatgcaaaaaattagccgggcatggtggtgcgcgcctgtagtcccagctactcgggaggctgaggcaggagaatcgcttgaacccgggaggtggagcttgcagtgagccgagatcgcgccattgcactctagcctgggtaacaagagtgaaactccgtccaaaaaaaaaaaaaaaagggtgggggcaaatcctgaacgtgtgtcttgagatctggtctgggaaggggcagagtttacacaggagatgttccttggtcccctgtagaactggtcctgtatccctgaatgtgcagggcctggggtgaaatctgtttctggagcccacctggagtcctgagtctgggatttaaggccagtgcttaacttgacttggcccttactcacagatcgagaagaagctggaaccactgtcacaggatgaagaccagcacgcggacctgacccagagccgccgcccacttaccagctgcaccattttcctgggatatacatccaacctcatcagttcaggcatccgtgagaccattcgctaccttgtgcagcacaacatggtggggacctggtgaggccgtggccttggcctctgggtcaatgggcaatgcagttattgatcgtttaagtgagatgggcagataggggtctgttataagcagaggaatagaatcaagttttgttttgtagcagagctccctcataagagtcactggacaaggatgaggttagaagttctgcccagaatgagggcaggggcttccttcttgggccaaattcactgccttgtggctgcaggtggacgtattggtgaccacagctggcggcgtggaggaagacctcatcaagtgcctggcgcccacatacttgggcgagtttagcctcagggggaaggagctccgggagaacgggatcaataggtgagaaccctgagtggtgttgggcaggggagctggaccaagggtcctggggcctgatgcctacatgcctcctgttctcaggatcggaaacctgctggtgcccaatgagaattactgcaagtttgaggactggctgatgcccattctggaccagatggtgatggagcagaacacagaggtggggctggggcaacctggaggggccagttcagtgggagtcaggggaggcatggcctgaaggtcacatcctctcctagggtgtaaagtggacgccttctaagatgatcgcccggctgggcaaggagatcaacaacccagagtccgtgtattactgggcccagaaggtgaggacctaagcgggagcaaagtagccagactttggcatgtgttaacttatttcatctttccagcctcctggggattcagtactgttattctcagcatcctcactcttagatgaggagactcaaacacagataggcgtggtaattttttttttttttgagacaggatcttgctctgtcacctaggctggagtgcagtggtgtgatcacagctcattgcagcctcaacctcctggggccaagcagtcctcccacctcagcctctcgagtagctgggaccacaggcacatgccatcatgcccagctaattttaaaaattttttgtagagatgggggtctccctgtgtttcccaggctggtcttgaactcctggcgtcaggcagtcctcccaccttggcctcccaaagtgctgggattacaggcgtgagccactgtgcccagccaggctaggtaattttgtctgaagtcacacagataactagtggggcctcagcatccttatgctcctcccagactatctctggaacagtagaggcaacacttagcaactctcctggggcctggctcagggtcccacactcccagatgctataaaataagagctacccactccctttaattagagaatcagaacctgaaaaaaaaaaaaaaaaagctacatagtctttttttttttttttttttttttgagacagagtcttgctctgtcgcccaggctggagtgtaatggtgtgatttcagctcactgcaccctccacctcccaggttcaagtgattctcccgcctcaccctcctgagtagctgggactataggcacccaccatcatgcccggccaatttttgtatttttctacagatggggtttcaccatgttggccaggctggtcttgaactcctgacctcaagtgatccacccgccttggcctcccaaagtgctgggattacaggggtgagccaccacacccagcctacttactctttcttttttacgagacagggtctcattctgtttcccaggctggagtgcaatggcacaataatggctcactgctgtcttgagcttctgggctcagtcgattctcctgcctcagcctgctgagtagctgggactacaggtgcgtgccaccatgcctggctaattgtttttgtagagatgggaactcaccatgttgcacaagctggctctttttttttttttgagacggagttttgctcttgttacccaggccagagtccaatggcgcaatcttggctcacagcaacctctacctcctgggttcaagcaattctcctgcctcagcatcaagttcccaagtagctgggattataggcatgtgccaccacccctggctaattttgtatttttagtagaggcagggtttctccatgttggtcaggctggtgtcgagctcctgacctcaggtgatccacccgcctcggcctcccaaagtgctgggattacaagcgtgagccaccgcgcccggccacaagctggctctttaaaaaagaattagacggccgggcatggtggctcatgcttgtaatcccagtactttgggggctgaggcgggtggatcacctgaagtcaggagttcaagaccagcctggccaacatggtggaaccctgtctctactaaaaaaacaaaatgcaaaattagctgggcatagtggcatgcgcctgtaatcctagctactcgggaggctgaagcaggagaatcactggaacccaggaggcagaggttgcagtgagctgagatagtgccattgcactccagcctgggcaacgagtgaaactccgtctcagggaataaaaaaaaagagagagaaacagctcagcaagctaagaataggctggttctttatgtgccaggcactatactaagtgttttctgtgggttttctcatataggcctcatctgtgagaggtgtttctgttatgcttataattgaggaaacagtcctagagaaattaggcaccccatccacagtcagatagtcatatagccagcatggagacgaggctctgagctccagccactgtcctgtcatgttctctgcagaaccacatccctgtgtttagtcccgcacttacagacggctcgctgggcgacatgatcttcttccattcctacaagaacccgggcctggtcctggacatcgttgagggtgaggcgctagggccacagaggagaggggaaggagggctggctgagtccaaggcctgacttcggcgctcttcccccagacctgaggctcatcaacacacaggccatctttgccaagtgcactgggatgatcattctgggcgggggcgtggtcaagcaccacattgccaatgccaacctcatggtgagtgggggtggcgcttcggcccactctgcagacatgctgtgtggtgggcctatgccatgtgctgggtagacagcatgaactagacaggccaggatccctgctccccgggactgatgttctagtaggggagatagcaaacaagtgacatccacgtcagggggcagtcattgctacggggaatactaaatgatggcatgagaagagaaaggggtgctgtccaacaagaggttttggaaggaggcttctggaagtgtgagctgggagcaggggtttggggaggcatctcccaggagctatgtggttgtctcccgtgccaggagtttgtgctgctgtactagcattgagcttctggattgcaaagttcccaggagagggaacagccattgcaaaggctctggggcgcctgaagtaatccaggaacagctgggtacctggtgaggggaaggtggagtggtgagggccaggaggtgatgcagggaggtgccacagggagcctgctgggccctgtgggctgaggcggggctttggcttttgcactgagagaagtgggagaggacttgactcgggttcccatgctccccctggtggccatgtggtgaacagatggtggcaggtgagtgagaactccagtccaggacagtggtgaccatgcagggatcaggaggcaggcggtggttggatttggagggcttctgaagatagagttgctggcagctcctgccttgcagatggggcagggttgttgacacctggctgttgggtctggggaaacacagccatcgttgcccagcagctctagtgaccccagacattgacatgggccctgtctgggagcgaatgtctgtgaagggcttccttcatctgggacacacctctcagcctgtttggctacggtgtcctccctctgtgtctgtctcctgtgactggctgactgggcccaccgtgcccccgcctccccacagcggaacggggccgactacgctgtttacatcaacacagcccaggagtttgatggctctgactcaggtgcccgaccagacgaggctgtctcctggggcaagatccgggtggatgcacagcccgtcaaggtaagcgctggctgggtggggcatagggtctctgggacgatgagtgtgggtcccatggcttacccaggttcccccctacccaggtctatgctgacgcctccctggtcttccccctgcttgtggctgaaacctttgcccagaagatggatgccttcatgcatgagaagaacgaggactgagcggctgcggtcccaggaaggtcttaccccctcttctatttattaatttgcagacccagcccctcccctactttttggtcagctacgtctctagaataagatggtatctgaagtccttccatgtctgtgtctcggtccttggtcctgttggtgggtcccctggcttcagcctgctccatcctctgcctcataggcctcctctcgccagcactggacgctgcctcccatggcggtcagcaggcagggctctgttgggtggtaggccagcgactgcaccacaccggaacccacaggcagggccagagccagcgcaccctgtggagcgaggggtagggagtggttatctgtggctgggctgtaccctggtttctgaggtccctgggcaccccccatctcagtcctgcctgaagccctcagtcacctctccccgaccttcagccacctgcctctaattgcctcctagacactgcaaaattaatctacctcagactgagcccctcagtagctctgtcctaccaggtgttcaggccgcaagtcttgggagcctcttattgattttttattttttaaaatagcagagatggggtcttaccatgttgcccaggctggtctcgaactcctggcctcaagtgatcctcctgccttggcctcccaaagtgctaggactacaggtgtgagccaccatgcctggctttgggagtctttttctttttctgtttttttttgagatggagtcttgctctgtcgccaggctggagtgcagtggcgccatctgggctcactgcaacctccgactccctagttcaagcgattctcctgcctcagcctcccgagtaggtgggattacaggcacgcgctaccatgcccagctaatttttgtatttttagtacagatggggtttcaccatgttggccaggatgatctctatctcctgacctcgtgatccacccccctcggcctcccaaagtgctgggattacaggtgtgaaccaccatgcctggccgggagtctttttcttgtaccacatgttcctctatcagttattcctcttggctctgcttctagaccatgtccagagactgctgattttctgccactaccatgtttggagcatgccttgctcacagcttgcctgttccctgccaccagctgggctccatcctgtccatttggcagccccaatgatccccacttcccctggtcccaacacaatgtaaacagttcctcaagcaagccatgcttcctctttccaccttgaaaatgtcccttgatgtgcctgccctccaaggcaacttctgttctactgggcccataagaaataggtggaacattcttgctaccttagttcctaaagcaagagcttgtccgccaagtcttcagggcccccccggttccctccatcctcttatgggccttagttcccctggccaagcccagcgctgatgtctcctttgccgagattcccccggctctgaccccactacaccaggatggtctgtttctggcctgactccccaccaggctgggacatgtcaaggacagggctcagggcttgaaaccatgcacagggatgctaagatgtagctccagtttcttgaatgactgcagccctatctcacccaaggttagacatggccgtcggctcccccttgcccaggggtcagtgccagttgctcggcctggcatctgcagcccagcctgaccccggatcttgccgcacctgccgccaccctgaagcctttgtttcctgactgatgcatgcgcaggctacacctcttaacatatgctgttccctttgcctggaatgcccttcctgcctcatcttctctctagcccaagctgggcacggtgtctcaggcctgtaatcccagcactttgggaggccgaggcgggtgaatcacttgaggtcaggagtttgagaccagcctggccaacatggtgaaaccctgtctctactaaaaatacaaaaattagccaggtatggtggtaggggcctgtaatcccagctactcaggaggctgagacatgagaatcacctgaaccctggggggaagaggttgcagtgagctgagatggcgccactgcatttgcctgggcaatagtctcaaaaaaagaaaaaagggccgggtgtggtggcttacgcctgtaatcctagcacttgggaaggctgaggtgggtggatcatgaggtcaggagtttaagaccagcctgaccaacatagtgaaaccctgtctctactaaaaatacaaaaattagctgggtgtggtggcacgcacctataatcccaactactcaggagactgaggcaggagaatcgcttgaacttgggaggcggagtttacagtgagccaagattgcgccactgcactctagcctgggcgacagagcaagacttgtctcaaaaaaaaaaaaaaaaaaaaaaaaaagatcctagccttcaggccctggagtgactgaggtaaggacagggctgagatggggcaggcatctaggtatgaagtagggctgggggcacctcacctccaccaggtcccagaagaacaccttcccgtcctcagaacagctgaccacatgtgtgtcacgctcgctcaggcagcagtccagcttgtattcctggttcttatggcccttgtacctaagggtggacaggatcggggggcttggtcctctccaggggtgggagaggagggaaggggatccccacgaccacaaggactcactcgcccagcagctcccctgtgtctttgtccaggagccgcaatgtggagtccaggctggacaccagggtgcactgcccatcccggctgaagcaggtgcaggtgatggggccttgggggaagggtgggtaggtgagtgagggtggggtgcccctggttggccccccatcttccctgcctgtcccacatccccagccacactcactgcccacgtagtctgagaagagctgccccatccttaggtcatagcgtctcacgcggccatccacggagctgcaggagagggtagatccagcgggaaccttgactacactcacatggctccaggcagccctgtgccttcccagcccagtgggcctgctcttccagtgcacaggagtggaattctgaagctctggccttgagactcaggcccagggccaattacgtcctactccatcatttccaagacccacaccccctttccaagcccttggagtccttctgattcccccttttcttccttttgtttgagacagagttttgctcttgttgctcaggctggagtgcaatggcatgatcttggctcaccggaacctctgcctcccgggttcaagagattctccttcctcagcctcccgagtagatgggaatacaggcatgcaccaccacgccctgctaattttgtatttttagtagagacggggtttctccatgttggtcaggctggtctcgaactcccaacctcaggtgatccgcccacctcagcctcccaaagtgctgggattacaggtgtgagccaccccacctggcccaattcccccttttcctgcattctccagctcctcctcctcagtactcagtcccaccactttccccactacccagcaccagcatctagactgttctggtctccctgcaccccccacagccaccagagggagcacttttcaaagtacagttgacccatgaacaacacggtttgaactgaacgcgtccacttatatgtggattttcttctgcctctatcagctgtgagacaccaagatcaatccctcctcttcctcctcctctgctttctcaacacgaagatctttatgacgatctcttcacttccacttaatgaatagaaaatatattttttccaccaggcgcggtggctcacgcctgtgattccagctctttgggaggccagggcaggtggatcacgaggtcaagagatggagaccctcctggccaacatggcgaaaccccgtctctactaaaaatacaaaaattagctgggcgtggtggcacgcgactgtagtcccagctactagggaggctgaggcaggagaatcgcctgaacctagaagttagaggttgcagtgagccgagatcacgtcactgcactccagcctggcaacagagcgagactgcgtctcaaaaaaaacaaaaattcttccttatgattatttttatgtatttatttatttaatttatttacttattttgagacggagtcttgctctatcgcccaggagtgtagtggtgcgatgtcggctcacagcaagctctgcctcctgggttcactccattctcctgcctcagcctcctgagtagctgggactacaggcgcctgccactatgcccggctaattttttgtatttttagtagagacggggtttcaccgtgttagccagaatgatctcgatctcctgacctcatgatccgcctgcctctgcctcccaaagtgctgggattacaggcatgagccacagcgcccggcctatttttatttatttttagaaatcattttatctttttttttttgagatggagtctcactttgtcgcccaggctggagtgcagtggcacaatctcggctcactgcaacctccaactcccgggttcaggcgattctcctgcctccgcctcccgagtggctgggattacaggctcccgtcaccacacctggctaatttttgcatttttagtagagacggggtttcaccatgttggccaggctgatctcaacctcctgacctcaagtgatctgcccaccttggcctcccaaagtgctgggattacaggtgtgagccaccgtgcccggccagattattattattttgtagacagtctgtctttcacccagcatggagtgcaatggtgcctcgaactcttggactcaagtgatccttccacttcagcctcccaagtagctgggattacagctgtgtgccactgtgcccagctgagagtaggttttaatctgagcatgggggcagctatgattccccgtagcacctggggtgagaccaggtcctggctccactcaccctgccaggatctcgtggtctgacaccttcacactggacacgccatctctggcctcatccagcgtctgcactggctcaggcctccgtgagcggcaatcccaacagcggatactggaatcaatagagcctgtgaggccagcatgatggtgaggtcaggtttggagggggagggcagcaccctgggcccccgtgcttaggccccagactcaccggacaggataactgtggcctcttcattaaactgcaccgtgttcaccttctgagaaagttattgccactcagaggaggctggactttggaggactgggataaaggcagggttcccagtgtcggttaaagcaagggcgaaggggaggtgaaaggttttgggggaacagcaaggacaggggttggtgactgcctagcctggcatgcggagtgggggatcgtcatctggggaagggatccttacggtgtaatgggggtggccgtgtcaccacctatgcgctaatacgggtcccctccactcaaatgagggtctccaggctttcactcacccctgcgtggccccggaatttgcgcacgacctgccctgatgccacatcccacagaaccaccgccttgtccccgccgccggagcagagactactgttgtcaaaggagctggagtaaaggaggaggaggatcagcatcgacctcggatcccagcctcagcgctcccatcccagcctggtccccggctcacccggccgcatccagcacctcgtagccgtggccgctgtacgtccgcagcagcgtcccccgaagcgggttccacagcttcagcgtcttgtcactgccgcacgtcaggcagtaattgccatccactggggaacaccaggcgggggttactgggccgtcgatctcaggaggcgggaggaggacccggaatgaagacgaaggcgctcaccattaaatcgtacggctcgcactgccccctgcccgcagtccagcgtcttcaaccgtttctgcggcagctctggaggccgcggctttggctcagggaaagccatgctcccaggactccttccttgcagccttaaatcggtctgtacggaaaattccgcgccttagaaacccacgcttgggtgtaaccttattattgttcttcctgacctacttcctgtttatcacttccgggttcatcattttggcatttcggtgatcgggttggaactattgaagcccgctttcaggttcttttccccattttccctttgaaaggaagacttctggcttctcctaaatctccgttctctgggtaaggggagtccaagcctctgtcatgaggaacggaaatgcgagggcctcgggtgttactctaaaatccgccctcagcttgcacgccggaagctgcgattcctgcagcggaagaggcgtgatctggccttcgactcgctatgtccactaacaatatgtcggacccacggaggccgaacaaagtgctgaggtgaggaccccagcgtcgtgggcacgggttcgggttgtgggtgtggatcggggccctgggaagcgcctgtctatcccgggggcaggacctgagcgcccctgaccctcgagcctgtcgcaggtacaagcccccgccgagcgaatgtaacccggccttggacgacccgacgccggactacatgaacctgctgggcatgatcttcagcatgtgcggcctcatgcttaaggtgggcggggttgagcttctatgggtgtagttggacctgagaacgaggcccgggggcgggtttggaatgaagcggggtgtcttgtcattgctgatggggcgggacctgagatcggccgggagtggggctgcgatgacgctgggccgagaaagccccagtctttggtgaagtcaaggattcgagtcaggttggggatgtggcagattggtctgcgagtggggccaggctttgaagcaacttggagaggagttgtggaaaaagggcagggtcttaagcatgtgggatgtcagagtctctcttggtcctgagagacgcaggccagacagtaggactagaaaccacgtatctagagtatgccatgagcaggtgggactgaggaattccgggtggggcaaggtcccagctgcatcagatggaatcagtgggcatgatctggtgtctggaaaggtggcttcggggactcattgttgtgcctttcactaacctgcccacccacttacctttccctagctgaagtggtgtgcttgggtcgctgtctactgctccttcatcagctttgccaactctcggagctcggaggacacgaagcaaatgatgagtagcttcatgtgagacttgccctacagaacaagtgactcttgagtaaggggtggggggaccccagcctggccatcctagactgacacctctctcctgtctcaggctgtccatctctgccgtggtgatgtcctatctgcagaatcctcagcccatgacgcccccatggtgataccagcctagaagggtcacattttggaccctgtctatccactaggcctgggctttggctgctaaacctgctgccttcagctgccatcctggacttccctgaatgaggccgtctcggtgcccccagctggatagagggaacctggccctttcctagggaacaccctaggcttacccctcctgcctcccttcccctgcctgctgctgggggagatgctgtccatgtttctaggggtattcatttgctttctcgttgaaacctgttgttaataaagtttttcactctggctgtcagcctcttctgttcagtggggtgttcctcctacctggcgggaagggctctagccccataggcctggtgtggggccccagtctggaggcttctggctgttcatttgcttacttcataaaccttgtgtcttaagtcaggtgctagggacaagacagtgacttctgccctctggcaactcaccagatggccctgctgacctagataatctaggctttggtttccttttttttttttcctttttaagaaagaaaatggtcttgatctgtcatgcaggctgagtgcagtggcacaatctatgttcactgcagcctcaaactcctgggctcaagcaatcctcccacctcagcctgccacgtaactgggaccacaaatgcgtgctaccatgcccagttaattcttgttttttttgagacagagttttgctcttgttgcccaggctggagggcaatggcatgatcttgatctcggctcactgcaacctccgcctcccaggttcaagtgattctcctgcctcagtctcccaagtagctgggattacaggcatgtgccaccatgcccagctaatttttgtatttttacattttgtgtaaaattacaaattttgtgttttcaaacccgtctctacaaaacaacccatgttgcccaggctggtctcaaactcccaggcccaagtgattcaccagcctggccctcccaaagtgctgggattgcaggcttgagccactgcgcctgccctgggctttgttttcttatcagagaatgaactggtaggaattgggaaaggcatgaaagactcggggtccttccccacttgtcagaccctcttttctctccggaacacccagggatccttctcaaccaggctggatcccatccctggtactccaggggtatttacccaacgtcccaatccccacagtataggactcttcatcagatcctcctcttaggcaagctaggtccttccaggaccctagcgctgaaggtccatgggacggacaccctggattcccatggacacactacaccggctaggaaaacccggcccccttaggaaaagcacttctgctcctaccggcattaagaggcattccgtcttggaattccggcattaagaggcattccgtcttcatagcccgtgagacgccagtgtcacctttagcccaaccagtgccctgagggtggcattttcctaccttcctgtaacgacccccgggattgcccagggctacagcctctctcccgtgagcctccagaccgcgccctggccccgcc

SEQ ID NO: 591 - DNA, 3830 bp, Homo sapiens
ctgggcacggtggctcatgcctgtaatcccagcactttgggaggctgaggtgggcggatcacgaggtcaggagatcaagaccatcctggctaacatggtgaaaccccgtctctactaaaaatacaaaaaattagctgggcgtgtggcgggcgcctgtagtcccagctacttgggaggctgaggcaggagactggcgtgaacccgggaggtggagcttgtagtgagccgaaatcacaccactacactccagcctgggcgacagagcaagactccgtctcaaaaaaaaaaaaaaaaaaaaaaaagctctctgattttagctgttaggtgggagatgggttggaggataccaaagccagcttgcaggctatggggataaagaaaacacctggatttcggacctactttataggtagaggttggcagacatgctgagaaggatggatgtggggtgtgagaaaaggggagacagcaagctgcgctcctcatttttaatttttatttatctatttttgagacggagtttcgctctgttgcccaggctggagtgcagtggcaccatctcagctcactgcaacctccacctcccgggttcaagtgattctcctgcctcagcctcctgagtagctgggattatgggtgtgcgccaccacacccggctaatttttgtattttttagtagagacggggtttcgccatgttgtccaggctggtctctaactcctaacctcaggtgatctgccctccttggcatcccaaagtgctgggattacaggtgtgagccaccgcgcccagccccaatccctatttttcagtctagtggatgagtggagggtggggccgtttgctgagatgcagaaagatcagggataggtggagagggagctgagggggcaactttgaggtccaagcgaggatgtcaaggaggatgtctgtctcctccaacaaggtaggctcattccagcctcacggcttttgctgttctgtcttcccatgtgcaggaaatggcctctctgcatcttcacatacggggattttctcagccttctggctttggctcaaatctcacctccttggcgtccttcacccatccctccaactaaaatcccgaactcctccacctaaagactcaaattatcctgtttaaatcctgattgcgctgggcgcggtggctcacacctgtaatcccagcactttgggaggccgaggcaggcagatcacctgaggtcaggagttcgagactagcctgaccaacatagtgaaaccccatctctactaaaaatacaagaattagccgggcgtgatggctcatgcctgtaatcccagctactcgggaggctgaggcaggagaattgcttgaaactgggaggcagaggttgcgatgagtggagatcgcgccattgcactccagcctgggcaacaagagcgaaactctgtctccaaaaaaaacaaaaaacaaaaaaggcctgatagcactcaccactattgttaactttctatcttcccaatcagattgtgggctccagtagggcagggtccacatcttggtcttgttcaccactaaatccttagtgcctagcacggagcccaccatagagaatagactacatgaattgtagagtgagtgaataatcctgttggccgtatgcactgttaggagggtgtgtttgagatacagatgacacccagggtctcacattcttgcaggagggaaagagacgtcagccctgggtcccagaagaggccactgacccagtgggagttcagggaaggcttcccagaggaggtggaggtgacagctgcagctataagggaaggaagaacagagcgttatgcagcatgtgaaggctttggagacttgtgagggcacgaaccgggctcactatcccattagacaaaagtggctgaggaaggatgaaactgtgtctaactctgcctggtgaccgaaatcttgtccatgggtgacgcttaagaagtgaccctcggccgggcgcagtggctcacgcctgtaatcctggcactttgggaggccaaggcgggcgggtcacgagttcaggagatcgagaccatcctggctaacacggtgaaaccccatctctactaaaaacagaaaaaattagccgggtgtggtggcgggcacctgtagtcccagttactcgggaggctgaggcaggagaatggcatgaacctgggaggcagagcttgcagtgagccgagattgcgccactgcactccagcctgggcgacagagcgagactctgtctcaaaaaaaaaaaaaaaaaaaaaagtgaccctcataaaaaaattagctgggcacgatggtgcacactagtcggaatgctggggtgggaggatgacctgagtccgggagtcagaggttgcagtgggccgagatcgcgtcacagcactccagcctggcgacagagtgagaccctatcaaaaaatagcagcaggccaggcgcggtggctcatgcctgtaatcccagcactttgggaggctgaggcgggcggatcacgaggtcaggagatcgagactaccctggctaacacggtgaaaccccgtctctactaaaaatacaaaatattagccgggcgtggtggccggcgcctgtagtcccagttactggggaggctgaggcagaagaatggcgtgaacctgggaggcggaggttgcagtgagccgagatcgtgccactgcactccagcctgggagacagcgcaagactctagctcaaacaaacaaacaaacaaaacagcaacaacaacaacaaaaccatcctcccctcccgaggggacagaacagaaacgaatgggcgagtgccgggccaagcagtgggtctccagcaggtggcattaaaataggaattttggctggggacggtggctcacacctgtaatctcagcactttggaaagcccaggcgggcggtcacctgagggcagaaccagcctcgccaacatggtgaaatgccatctctactaaaaataaaaaattagccaggcctggtggtgggtgtctgtaatcccagcaactcgggaggctgaggcaggagaatcgcttgaaccaggggggcagaggttgcaatgagtcaagattgcaccaccgcactccagcctgcgtaacaagagcgtgtaactcttgtctcaaaaataaattaaataaataaataataaaaataaaaaagaatcttcattcatgggaagtcgagaacacatgaaaacaagtaaaggccgaagcgcagtggctcacgcctgtaatcccagcactttgggaggctgaggcgggcggataacctgaggtcggaagttcgagaccagcctgaccaacagggagaaaccccgcctctactaaaaatacaaaattagccgggcatggcggtgcatgccagtagtcccagctactcgggaggctgaggcaggagaatcgcttgaacccggaatgtggaggttgtggtgagctgagatcgggcaattgcactccagcctgggcaacaagagcgaaaccctgtatcaaaaaaaaaaaaaagaaaaaaaaaggaagaaaaggcctaaaggcgccgggcgcggtgggtcacgcctgtaatcccagcactttgggaggccgaggcgggcgaatcacgaggtcaggagatcgagaccaggtgaaaccccgtctctactaaaaatacaaaaaaattagccgggcgtggtggtgggcgcctgtagtcccagctactcgggaggctgaggcaggagaacagcgtgaacccggaaagcggagctggcagtgagctgagatcgcgccactgcactccagcctgggtgacagagcgagactccgtctcaaaaaaaaaa

SEQ ID NO: 592 - DNA, 20245 bp, Homo sapiens
gcctttccagggccggggaaccccaggaggaagctgctgagccatgggcgcctacgcgcgggcttcgggggtctgcgctcgcggctgcctggactcagcaggcccctggaccatgtcccgcgccctgcggccaccgctcccgcctctctgctttttccttttgttgctggcggctgccggtgctcgggccgggggatacgaggtgagtggggcctccgagctgaaacgtacaggaggcagagtgaaacccagaatacagtctagaggtgtgggtgggtctgtcctgtgggtgtctagtgaatggctgatgatatgacagtgtggtctgagtgcgtgctttgtgtcattgcgaggtctggctgtgcgcatctgagtataggactgtgtctgattgtacctgcctccgtgtctccgggatgcttgcctagactttgtctgcacttaactgtgggattggaggggcaggaggtggcagggggtgagcagtgtatgtgtggggggaggtgctggctgagagctgggactctggagtctgcctgaaattccagcctagctcttacacttcctgagtgtgtgacgttgggcaagtcacctatcctctctaagcctcagtgccttcatctggaaactggggataacatcaccccacctcccacggtggccgtctgctgtcggcaaatgctgaacaaacatcagctacttctattattattttcccggagtgtgaatgagagctgccctgtggggttgtgcaaagtggagttgtatctatgagcacaactatgtatgtgtgtgtcctgcctgggagggcctggcctcctctgcacataggcgagatcaggcctctctgagtcactcacctctagatcaagacttactctgcagcccccgacctcgggggttattgacaaggtatgtgtgtttggggtccctgtgcagacatgccccacagtgcagccgaacatgctgaacgtgcacctgctgcctcacacacatgatgacgtgggctggctcaaaaccgtggaccagtacttttatggaagtgagtagaggatggggactggtccctgggatccccatggtccctgtaatccctctgggtcctggacattagggtggggccagtgctaccctaatatccagggtttgggctcctctgtctaggaataacccccttggctctgctgttccctgagagccttatccctgttatccacagtcaagaatgacatccagcacgccggtgtgcagtacatcctggactcggtcatctctgccttgctggcagatcccacccgtcgcttcatttacgtggagattgccttcttctcccgttggtggcaccagcagacaaatgccacacaggaagtcgtgcgagaccttgtgcgccagggtgagcctaccccaaggaagtgaaaagaggaagcccagcccagcttctgcttctgcatctctggtttctgagatttgtcatgccacgtgcaagctgtataacatgcgtgtcgctccgcctgcctggactctccatttggagacctcctatacatcccacaaagccccacctgctgtgcatcctctgggaagcctgccatgcagggggcctctttcccatatctgggaactatggcctgggagcgacccctcttgtccttccgccagaaatgtgtacacaggcaggctttcacattcccagtatcacccaccctactcccactcctggctctgaccgctgaccctgaccttgcctgtcctggcacagggcgcctggagttcgccaatggtggctgggtgatgaacgatgaggcagccacccactacggtgccatcgtggaccagatgacacttgggctgcgctttctggaggacacatttggcaatgatgggcgaccccgtgtggcctggcacattgaccccttcggccactctcgggagcaggcctcgctgtttgcgcaggtgcgacccgggacctctcttgggcccacttcttcactcactctggctcctccctcgcccagtcaaaccccgccctctccctgcaatctcacaaggaccaggcccaggcctaggcctgttgaagccctgccccttgagtgagccgtaaagccagtggcttttgagctctggcctcagccggctatgcccagcccaggctgacccagctccggctggctccgccctctcccctaataggcccctcttggtgttctggccccacccactagctcgggtcctggctcctccctaaaccgggtggcaagtggatgcctaggctgccttaaaaacaggttcattacctgtgctcagaccccatccatcctcaggctgtggaagggggaacctcattcctggagtcaggcctgctctgcgctttgacagtgctggggaggtgaacctgggttctgatgttggacccgccctctccctgctagcccaaggtggtgagttctgaaacttccccaagcttggaaataagctggaggcctctctgtttcagccctacgtgtttttgtttttgttttttgagacagggtcttgctgtcatccaggctggagtgcagtggtgcaatcctaactcactatagcctcaatctcccggattcaagcgattctcctgtctcagcccccctagtagatgagactacaagagcgcaccactacgcctggctaatttttaaattttttgtagacagtctgcccgtgttgtgcaggctggtctcaaaaactcctgggtttaagtgatcctcctgttttggcctcccagaaggctgggatcataggcaagagccaccacatcgacctagcactgctttttaacctgtgctctgacctgcccctcccaagcagaggggagtttggtggtgagagggctgggcactaattcacactgccttttcctccctcatccccagatgggcttcgacggcttcttctttgggcgccttgattatcaagataagtgggtacggatgcagaagctggagatggagcaggtgtggcgggccagcaccagcctgaagcccccgaccgcggacctcttcactggtagggggcttggtgagggcagggccagccatggtgccacacactcagaagggccctgggcttgatatctgctctgttgtcactgtcctggaattcctatagtctgggaacaaaggccctgcatttccttttgcattgggacacaaattctgaagcccatcctgggtgggacatggccggctttgaaaccagggaaggtctgggtgatgggccaccccttgaacttggtgtgacctgcaggtgtgcttcccaatggttacaacccgccaaggaatctgtgctgggatgtgctgtgtgtcgatcagccgctggtggaggaccctcgcagccccgagtacaacgccaaggagctggtcgattacttcctaaatgtggccactgcccaggtaaccctggtgtccagaaccttcgagtccggtatatacaatacaatgagctctttccatggtacaggcatcccctaacacgttctccttatttttaatttttttgagacagtcttactctgtcacccaggctggagtgcagtggtgcgatctcggctcactgcaacctctgcctcctgggttcaaacaagcacatccagctaatttttgtatttttgcactggggtctcatcatgttgtccaggctggtctcaaactcctgagctcaagtgatctgcttgcctcggcctcccaaagtgccgggattacaggcatgagccaccgcacctggcctctatttttaacatttttatttatttattattatttttttttttttgagacagagtcttgctctgtcacccaggctggagtgcagtggcatgatctcagctcactgcaacctccgcctcccgggttcaagcgattctcctgcctcagcctcctaagaagctgggattagaggcacctgccaccacacccagctaatttttgtatttttagtagacagggtttcgtcatgttgaccaggctggtcttgacctcaggtgatctgcccgcctcaacctcccaaagtgctgggattacaggtgtgggccactgtgcctagtctatttttaacatttttattgagaattccttttttattttttttagactcactctgtcgcccaggctggagtgcagtggcacgatctcggctcactgcaacctccacctactgggtccaagcgattcttctgcctcagcctcccgagtagctgggattacaggtgcccaccaccatgctcggctaagttttatgtctttttagtagaaagggggtttcaccatattggccaggctggtctcgaactcctaaccttttgacccacagccttggcctctcaaagtgctgggattacaggcgtgagccaccgcgtccagcctttaacatttttataattaaaaaacattattttttcacagagataaggtctcaccatgtggcccaggctggtctcaaactcctgaactcaagtgatcctcctgccttggcctcccaaagtgctaggatataggtgtgagccaccatgcctggcataacacgttctccttaaaaaaatttttttttcctttctttaaaaattgatggctgggcatggtggctcacgcctataatcccagcattttgagaggccgagatgggcagatcatctgaagtcaggagttcaagaccagcatagccaaaatgacgaaaccctgtctctactaaaaatacaaaaattagtcgggtgtggtggcgcacgcctgtaatcccagctacttgggaggctaaggcaagagagtcgcttgaacctggcaggtggaggttgcagtgagccgagatcacgtcacttcactctagcttgggcagcagagtgaaactctgtctcaaaaaaaaaattgttttagattaattttttttttttttcttgagacagggtcttgctgtgtggcccaggttggtcttaaactcctagactcaagcgatcctcctgcctcagtctcctgagtagctgggattacaggtgtgagcccctgtaatcatgttctcatgccccctggaggaagatgctattctattcaccatcacaatgtccccctcctggatttatgtgcattcctcattagaagagatagcataggctgggcaagagatagcatggcatggtgactggatgccctcttctaggtagtgggtccaagagaactgctcaacaactggtggctacttttatctgtgtccccacgctcccaagtgccatacccccacccatgcctgtgcacccaacatccttgaccccatatacatcaaaacacagctatacacagggatggcccaggatcctctggcttcaggactcccctcttgcctgcagggccggtattaccgcaccaaccacactgtgatgaccatgggctcggacttccaatatgagaatgccaacatgtggttcaagaaccttgacaagctcatccggctggtaaatgcgcaggtcagtgcgcctaccctgtggtacccttgtgcacatgtgcgcttgcatccgggggccttgggttatgtgcatagctctcagtgctgtctttgttttctattgttctattgtggtcattctataacaaatgaccacacacttagcagctcaaaacaacagaaatacattgtcttacagttctgtaggtaagaagtccagcatgaggccgggcgcaatggctcatgcctgtaatcccagcatgttgggaggctgagccgggcagatcacgaggtcaggaattcgagaccagcctgaccaacatggtgaaacgctgtctctactaaaaatacagaaattagctgggtgtgatggtgcgtgcctgtaatcccagctactcgggagcctgaggcaggggaatctcttgaatccgggaggcggaggttgcagtgagcggagattgtaccactgcactccagcctgggccacagagaaagactctgtctcaaaaaaaaaaaaaaaaaaaaaaaatccagcctgagtctcaccaggctataatcaaggtgttggcaaggctgtgttccttctgcagtctctaggagagaatataatttccttgctttttccaacatctagaagttacccacattcaaaatctattcttggctccatcttcaaagccagccacatagcatctttctgaccctgtttctgtaatcacatccctttctctcattctcacctcttctgcctctctcttccacattttatttatttacttagagacggagtctcgctctgtcgcccaggctggagtgcagtggcgtgctctcggctcactgcaacctccgcctcctgggttcaagtgattcttctgtctcagcctcccaagtagctgggactacagtcgcgtgccaccacgcccagctaatttttgtatttttagtagacagggtttcaccatgttggccaggatggtctcgatttcttgacctcgtgatccaccccgctcggcctcccaaggtgctgggattacagatgtgagccactgtgtggcctaatttccctactttaagtttggctgatgaacaacctcaattccatctgcaaccttaattccccttttgccatgtaatctaatgtggtaataggttctggggatcaggacatggacacttttgggcagttatcattttacccaacacagatgtgttagtgttttgcactaagtggcctgtggctgtggctgtgtgcacagtcagtcactctcatcagcacagaaacttgtctcccctctcccatctcagacaccccttcccatcaatcttgtcctcactacggtgcaatctccattcccaccttccactcgctcccagcactgctatttcaccaaaacagctcttttatgtcatttatttttatttattttttctttttaaaattttatttatttatttatttattgagacaagagtcttgctttgtcacccaggctggagtgcagtggcatgatcttgcctcatggcaacctctgcctcctgggttctagtgattctcctgcctcagcctcccaagtagctgggactacaggcatgtgccaccaaccctggctaatttttgtatttttagtagaggcagggtttcactatgttggccaggctggtctcaaaactcctgacctcaggtgatccgtccgccttggcctcccaaagtgttgggattgtaatctgaggtgggcggatcacttgaagacaggagttggagaccagcctggccaacatggtgaaaccttgtctctactaaaaatactacaaattaggtgggcgtgatggcactcatctgtaagaccagctactcggcaggctgaggcaggagaatcgctggaacctgggaggcggagtttgcagccagctgagatcgtgccactgcactccagcttgggcgacagagtcagactcagtctcaaaaaaaaaaaaaaaaaaaaaagtttattgagcacctactgtgtacattgggggacacagctcgtgcaaaacaaacatccttttcctcacataggtcactttcttgttcctccaccttgctcaggtgaaagtgcacctccattcattataaaaattgtgtctaggccgggcacggtggctcatgcctgtaatcccagcactttgggaggctgaggcgggcggatcatgaggtcaggagatcgagaccatcctggctaacacggtgaaactccgtctctactaaaaaatgcaaaaaattagccgggtgtggtggcgggcacctgtagtcccaggtactcatgaggctgaggctggagaatggcgtgaacccaagaggtggagcttgcagtgagctgagattgagccactgcactacagcctgggcaacaaagtaagactccgtcccaaaaaaaaaaagttgtgttttttggtaacaatctgacagtcctgcaaaacgattattcctgccctataatgtcacacttagtttttccacaaaagtttttaataataaagttggaattattgtaaaagtttagtaaaatttcaggtttattcttgcatctctgaaatccttttaaaaaaggctagtggtcatgtttgacttcagccaaaattcattttcacacccaaccattggcttgcacgccaaatatgtatttagagaaactgaacctatgggatgcatgaatgtgcacacatgtgtggaagtgtgggcccccaggaaggtgcggactcccgagggctcactccgtcgcctcccccagcagcaggcaaaaggaagcagtgtccatgttctctactccacccccgcttgttacctctgggagctgaacaaggccaacctcacctggtatttggggaaactggggagcttgggggggttggcatgccccgtgggtcatgaccctgccctcaatgcccctgccgctgtaggtcagtgaaacatgacgacttcttcccttacgcggatggcccccaccagttctggaccggttacttttccagtcggccggccctcaaacgctacgagcgcctcagctacaacttcctgcaggtgggtaggagccgggctagagggggcatgcagccccgaggcccgacaggctgggcgccccaacatacccctctgcctccaggtgtgcaaccagctggaggcgctggtgggcctggcggccaacgtgggaccctatggctccggagacagtgcacccctcagtaagtgtcgggcccaagaggggaagaggtttgcggctgaagttggaaaccacccctaggccgcccccctcgagtttcttctttttttttttttttttttttttttttgagacggagtctcgatttgtctcccaggctggagtgcagtggtgcgatctcggctcactgcaagctccacctcccgtgttcacgccattctcctgactcagcctcccgagtagctgggactacaggcgcccaccaccacgcccggctaattttttgtatttttagtagagacggggtttcaccatgttagccaggatggtctcgatctgacctcgtgatccgcccgcctcggtctctcaaagtgctgggattacaggcgtgagccaccgcccccagccgtcctcgagttccttcttaaagcctctaagaatcctgcccgccagcaccggacctttcgcttccccttggggtctcagctgagtcccacagaacctcaccggactcattgtctatgagcagatgaggcgatggctgtgctccagcatcacgacgccgtcagcggcacctcccgccagcacgtggccaacgactacgcgcgccagcttgcggcaggctgggggccttgcgaggtgcgcggggcgagacttgggagacacgggggtggagacaggaaggggcggggccagggcctgggaaaggggacagagacaggtgtgaggcgtagccgagagccctgtggcggggctacaagggctcgtgggggcggggcttgtaggaggcggggaaagatacaggaacggggcggggctttggaggggggaaggaggcggggcgtgggcaagaggaggcggagacagctatggggtatagtcaagggcagcagggtggggctagaaggggttttggggcgactcttgagggaggcgggacagagaccggaacggggcggggcctgaggagaggggaggagtcaggcctggcgtcctgaacccaccggtccctttgcgctcttccgcaggttcttctgagcaacgcgctggcgcggctcagaggcttcaaagatcacttcaccttttgccaacagctaaacatcagcatctgcccgctcagccagacggcggcgcgcgtgagccgggacgggaggggtggatctagggcagatgggctttagagggggtagttggaaaatgtttttggaggactatacaggagtgaaattacgtgggctgcgaagctgggtcagcagagagaacaacgcatctcgagggggcttggccttaagtgccgtgaccacactaggaccagccaggggtgtttctgtgcaaagtgggtgggtttggagaaggcctgctgtgacccatgccctctctgacccccgcctccccagttccaggtcatcgtttataatcccctggggcggaaggtgaattggatggtacggctgccggtcagcgaaggcgttttcgttgtgaaggaccccaatggcaggacagtgcccagcgatgtgagcccaaacaacgaatattcccccgctgggactcctcccccagtgggcatttcctcatcgcccccatggatatcgcctgcttccatgaatacctcccactcatgcatatctcttcccccctcttgtatcttctccctctgccccttaatatcagtctccccttgggaacatatgcctcctgtgagtggtcctcccttttttttttttttttgagacggagtctcgctctgtcacccaggctggagtgcagtggcgcgatcttggctcacttcaaactccgcctgctggattataggcatgagccaccgtgcctggctggtcctccattttaataccccgcttccccaggaaaatttattgctgtttatggacatctccttcattccagaaaacgtcctcccccaaacctcttcctcccccgagaacctgcctcaagggtttcttcccctacttcctccttcactcccccgactccatggtctctccaccctcccggtgggtttttttttccacctggtgaatcttctctgcaatcatttccttggaatctgactgtccccccaccacacacacctccatttcctttccccatctcaggactcttttccttccttgagttttttgtctccatgcatgtatagctttccatgggtactcttgactcagtttccctcctcctttatccgaggtggtaatatttcccagctcagacagccaggcgcaccctccggagctgctgttctcagcctcactgcccgccctgggcttcagcacctattcagtagcccaggtgcctcgctggaagccccaggcccgcgcaccacagcccatccccagaagatcctggtcccctgctttaaccatcgaaaatgaggtgagaccccatttcaatcccctttcctgctcctgtgacaaatttgaagtgtcatggtgagctgtgtggactctgggtcagcaggtccctaggcttatgacctcctgtcacaactcccctcattgtgtgtccttgagcaagtgacctttgtctgagcctcagtgtcctttcctgggactgttatgaggacccagtgtgatcatgggtgacacttgacagacatgtcagagttggtggcaggtggtggttcgcaattttggcagggacgtttcagggaaggtgttcccgataaaggtgacatttaagatatgacctgagggagggagccgtgtggctatttgaaggaagagagatccaggtggggagagaataacaggcataaaagccttcgagcaggagagtgtgcagaattccaggagccacaaggagctcagtgtggctgaagcagggtgaacgggtgacaggtcagaccttgagggccttgaggaccaacaggaagactttggcttttgccagtcattgttgctcatgtgtctactcctagctctttgggaggctgaagcgggaggatcacttgagcccaggagttgtcccagctaattgggaggcccagatgggaggtttgtttgagctggggagttcgaggttgcagtgagtaatgattgtcccactgtactccatcctggcaacagagtgaaaccctgtctgaaaagaataataataaaataggccaggcatcgtggattatacctgtaattctagcaccacgggaggctgaggtgggtggatctactgagctcaggagtttgagaccagcttgggcaacatggtgaaacccagtctctacaaaaaattagctgggggtggtggtacacgtctgtaatcccagctacttgggggctgaggaaggaggattgcttgagcccaggtggcagaggttgcagtgagccgagatcatgccactgcactccagcctgggtgacaaagtgagaccctgtctcaataaaataaaataaaagaagttctgcagtaggactgttcatgttaggaagaaaacatctttttcatatttttattaaaataaaataaaagaagttaaaacgttcccacaggcccctaaaagtcttgtgagttctggcattgtggttcacacatcagatgcccaagttggccctggtccgcagcagaggagggctttgatgggacttagggtatcacaggtgtgctctggctgttgtggggaacagactgtaggcagccagtgtggaagtgcagggacctggaaggggttgactgcactggccctggaaggccctggtaagaggtggtgaggttgaaaataaggttgggggggccgggcgcggtggctcacacctgtaatcccagcactttgggaggccgaggcaggcagatcacgaggtcaggagatggagaccatcctggctaacacggtgaaaccctgactctacaaaaatacaaaaaatttagccaggcgtggtggcgagcatctgtagtcccagttactcgggaggctgaggcaggagaatggcgtgaacccggaaggcggagcttgcagtgacctgagatggcgccactgcattccagcctgggcaacagagtgagactccgtctcaaaaaaaaaaaaaagaaaaaaaaagaaaaaaagaaaaggctggggtgggcacgttggctcatgcctgtaatcccaggactttgggaggctgaggctggcaggtcacctgaggtcaggagtttgagaccagcctggccaacacagtgaaacctcgtctgtaccaaaaatacaaaaattaactgggcgtggtggtacacacttgtagtcctagctactcgggagggagaggcaggagaatcacttgaacccaggaggtggaggttgcagtgagccgagatcatgccactgcactccagcctgggggacagagcaagactctgtctcaaaagcaaacaaaaaaaaaatcaggttgaatggctgggtgtggtggactgcttgagcccaggagttggacactagccccaggcaacatagtgggacccccatctctagaaaacaaatttaaatttttttttttttaatttagtagagatggagtttcactatgttggccaggctggtatcaaactcctcacctcaggttatccacccaacttggtctcccaaagttctgggattacaggtgtgagccaccacgctcggccctaaaaaaattttaaattgagaaaaaaaggggccaggcgtgttggctcatgcctgtaatcccagcactttgggaggctgaggggggggtggatcatgaggtcaggagttcgagaccagcatggccaatattgtgaaaccctgtctctaataaaaatacaaaaattagccaggtgtggtggcatgtgcctgtagtcccagctattcaggaggctgagtcaggagaattgcttgaacccgggaggcggaggttgcagtgagccaagatcacgccactttctgcactccagcctgggcgatagagcgagactcagtctcaaaaaaaaaaaaaaaacaaaaaacccaggccaggtgcagtggctcacgcctgtaatcccagccctttgggaggccaaggcgggtggattacctgaggtcaggagttggagaccagcctgaccaacatggcgaaaccccgtctctactaaaaatacaaaaattagccaggcatggtggcatgtgcctgtaatcccagctacccaggaggctgaggcaggagaattgctggaacccaggggcagaggctgtagtgagcagagattgcgcccctgcactccagcctgggcgacacagcaagtttctgtctcaaaaaaaaaaaataaaaatccggctgggcacagtggcttatgtctgtaatcctagtactttgggaggccaaggtgagcagatcacttgagttcaggggtttgagaccagcctggccaacatggtgaaaccctgtctctactaaaaatatgaaaattagccaggcggggtggtgggcacctgtaatcccagctacttggatagctgaggcacgagaatcacttgaacccgggaggtggggggtgcagtgagccaagattgcaccactgtactctagcctgggctacagagtgagactcagtctcaaaaaaaaaaaaagaaaaaagaaaaattaaaaaaagaaaacacacacacatacacacacaaacccatctgtggacccttttctgcccagcacatccgggcaacgtttgatcctgacacagggctgttgatggagattatgaacatgaatcagcaactcctgctgcctgttcgccagaccttcttctggtaagggaagatcaccaggcctgagggtggggtggtggtgctcggcatggagctagggccccttacctgactctcacctgccccaactccaggtacaacgccagtataggtgacaacgaaagtgaccaggcctcaggtgcctacatcttcagacccaaccaacagaaaccgctgcctgtgagccgctgggctcagatccacctggtgaaggtcagggactaggaatgatgagtgggcagttgggaatggggaagttatggagcccaagagggtggtgggccatgtgtagagtgagggtaggggaggatttacttttccttcagatcagtgggctaagacccacagatcagcgggggaaatatttgagggtccttccatagaattgatattcatagctggtcgtatgagagtctccccataggacacatcatacaaagccattcacatctgctgtggacgtttacatacttagttttggaaattgggggtggggcattcccacttggcccatgaatcaggagagccaaatatcactgcttgaagaattcaccaaagtctgtagtaagaggagcttctatctggagtgaatatttgagagtccacccttggattgattgggtttgggtgagtctcagggtgaatgcctatgggtgcatctggctaggaacagtggtttcccagggcctctcattgatgtttgactttcatagatgacaaaactcacatttgtccacattcaagagcctcgcgtttcatgtgagtccctttgagatgaatgtctgcatatctgtatatagttttgcctgttctaacagagttacccaaattaactgtgactagaataagatagaagattattttcttctaacaaaaagtctggctgttagtccagagaaagtggggtggttccataatcacccaggacctcctcttctatcttgttgctctgccttccccaatattcagtttccacctcatggtccaagatagctgctgaagctccagccgccacatttgtgtttgagtcagtagcagagggacaggggcaaggaacattgttgacaccacttggatcactttctatggggcaaactggtcactcagctactgatagcctcagggaagactggacaatatagtctttatcccaggtagccatgtgccaagctagaatcctattctatggggcaatggtgaacaggaggcgtttatgccacgctcaagagtgatgtggtaagccagatgcagtggctcatgcctgtaatcacagcactttgggagactgaagcaggaggatcgctgagcataggagttcaagaccaggtgggagcatttgctgattaggtgcctacatagtgatgccctgtctcaaaaaaaaaaaaaaaaaaagaggccgggtgcagtggctcacgcctgtaatcccagcactttgcgaggcagaggcaggcagatcatctgaggtcaggagttcaagacaagtctggccaacatggatagaaaccccgtctctactaaaaatacaaaaattagccaggggtggtggcaggtacctgcaatccctctactcgggaggctgaggcaggagaattgcttgaacccaggaggcggaggttgcagtgaggcaagattgtgccactgcactccatcctgggcaacaagagcaaaactctgtctcaaaaaaaaaaaaagaaaaaagaattatgtgggccaggcgcggtggctcacgcctgtaatcccagcactttgggaggccgaggcgggctgatcacgaggtcaggagatcgagaccatccttgctaacacggtgaaaccccatctctactaaaaatacaaaaaattagccgggtgtggtggcgggtgcctgtagtcccagctactcgggaggctgaggcaggagaatggtgtgaacccgggaggcggagcttgcagtgagccgagatcgcgccactgcactcccgcctgggcaaaagagcgagactccgtctcaaaaaaaaaaaaaaaaaaagaattatgtggcggtgactgaaggttgaccttgatgtaggccttaatggggtttatggccagggttgggggacatttgtaggactcacctctgctcaggtacagactgacatccacctcacccgtgtgcccgcagacacccttggtgcaggaggtgcaccagaacttctcagcttggtgttcccaggtggttcgcctgtacccaggacagcggcacctggagctagagtggtcggtggggccgatacctgtggggtgagtggcacaggctgggagaggggtgtggaagcaagggcagaggggtttatccaaggctcacaaccttgccatcccattgggtacagcgacacctgggggaaggaggtcatcagccgttttgacacaccgctggagacaaagggacgcttctacacagacagcaatggccgggagatcctggagaggaggtggggggtgactgagagcactgagggggtggtctgtggtgtgttggggcccaggggtggtgagggaaatttgctgattacatgagtgtgggagacagaggacgaagggagagtgaagggcgggggagccaggcagggtgcagtggctcacgcctgtaatcccagcactttgggaagccgaggcgggcagatcacaaggtcaggagatcgagactatcctggctaacatggtgaaaccccgtctctactaaaaatacaaaaaaatcagccgggtgtggtggcgggcacctgtagtcccagctactcgggaggctgaggcaggagaatggcgtgaagccgggaggcggagcttgcagtgagccgagatcgcgccactgcactccagcctgggtgacagagcgagactccatctcaaaaaaaaaaaaaaaaaaaaaagagttggggagccagatcccaagcctgatcagctcacccccaaccccaggcgggattatcgacccacctggaaactgaaccagacggagcccgtggcaggaaactactatccagtcaacacccggatttacatcacggtagctctcccccatcctgcacctccccacctcgatagaaagggaatcaccccttatctgcagcatctcaaagctgcctggggttggggttgactgccctctactttcacccttcaactcccaggatggaaacatgcagctgactgtgctgactgaccgctcccaggggggcagcagcctgagagatggctcgctggagctcatggtgagtgggtcagagccccatccgagccagggtcctcccaacctggacccctgctggaccttgaaggctgtttctggcccagttctctgctttcaggccccactaagctgaggactccgtttctttcttttcttctctttgagacggagttttgctcttgttgtccaagctggagtgcaatagtactatctcagctcactgcaacctctgcctcctgggttcaagtgattgtcctgcctcagccttccgagtagctgggcttacaggcacacaccatcacgcccggctaattttggtatttttagtagagatggggtttcaccatgttggccaggctggtctcgaactccttacctcaggtgatccactcacctcggcctcccaaagtgctgggattacaggcgtgaaccaccgctcccggccaaggactccatttctgtgtgtggcttttcctctccgtttttctccatctcctgcccaggctccctccacgctctggcgtgccatatccaggcccccctgttaggcatttacctccttccggcctggttcccatgcctacttggatcctgcctctgctggggttgccctaccagaccctcaccttcatcctcatccgttcctcccaccctttaatttcttttgacattcccacacgcccttacccagtttctggcccaaggacacccacaaacccacgactctcaccccctcctggccactctccccccaggtgcaccgaaggctgctgaaggacgatggacgcggagtatcggagccactaatggagaacgggtcgggggcgtgggtgcgagggcgccacctggtgctgctggacacagcccaggctgcagccgccggacaccggctcctggcggagcaggaggtcctggcccctcaggtggtgctggccccgggtggcggcgccgcctacaatctcggggctcctccgcgcacgcaggtgaggggcagcggggtaggcagagaggaccggattgaagtctaccagggagccgggtttgggtgcggagtttcctaggctcagcggggatccatttggccataattagccccaaaccctcgggccaaccccatcccctgggcagtccccgcccagtgccagcccagtcccaacccccctggactgtgtagaggcacagccctagctcatgcccctaaaccaccaactcacctccggccccgcccatttcactttagccccgccctctcaccgcccccaggctctgtcctgcctcacccagccccgcggcttcagccccgccgtaactcccaaagtctcaggtcacatcagttctgctccatcgggactcgaaccctaagcttgggaccgacccatctccccattggctcagtcctccctgtcacggccctggccgctcctctcggctgagccttgcccctctccggcgaaaccccgcccctacaacctagccctgcctcctgacctggctcggccccgcccttctccatccaggccccgcccctctccaactcagccccgccctctctcccgcagttctcagggctgcgcagggacctgccgccctcggtgcacctgctcacgctggccagctggggccccgaaatggtgctgctgcgcttggagcaccagtttgccgtaggagaggattccggacgtaacctgagcgcccccgttaccttgaacttgagggtgagaagggcaaaattgagaaggagatcggagagaggcaagagagagggagagaagagaaacctggctttgccccaactcatctgggcccatccccttccccgcaggacctgttctccaccttcaccatcacccgcctgcaggagaccacgctggtggccaaccagctccgcgaggcagcctccaggctcaagtggacaacaaacacaggtggggccctggtcaggggtagggaaggggtggagtcttacctggggccggcaggtgggggcaatgtgtgaggcatgggatgttggccaggacccaaaaaggtcatgagggtatggggcagagtccagacccaggttaggggcttaaaggatctgaaatgggtgcggcaaaccaggaatgggtcttgaggtttgtgggtgctgtttagtcccaagaacaagatttgaaaatccccatccatgtctagttctgggagggtgttcatcacccctggggtcagattgagggtacgaggacagtggccagattgagggtatgaggacattggacctgggggtggtattcggggccggggaagcaggttaagagtctgggattgaggccctggagacagattcggggatatgcagctgtgtctagacccaggggaggaagcatcgtggggtgagtcagaggaagtctgcacctcctcactcctccttccccctgcacctctccaggccccacaccccaccaaactccgtaccagctggacccggccaacatcacgctggaacccatggaaatccgcactttcctggcctcagttcaatggaaggaggtggatggttaggtctgctgggatgggccctccaagcccaagcctcctgctccgggggcagaccagactctgactctcctcttggggctgctgccattaaaacgctactactaagactcaggtcgctctgtg

SEQ ID NO: 593 - DNA, 9796 bp, Homo sapiens
gcctttccagggccggggaaccccaggaggaagctgctgagccatgggcgcctacgcgcgggcttcgggggtctgcgctcgcggctgcctggactcagcaggcccctggaccatgtcccgcgccctgcggccaccgctcccgcctctctgctttttccttttgttgctggcggctgccggtgctcgggccgggggatacgaggtgagtggggcctccgagctgaaacgtacaggaggcagagtgaaacccagaatacagtctagaggtgtgggtgggtctgtcctgtgggtgtctagtgaatggctgatgatatgacagtgtggtctgagtgcgtgctttgtgtcattgcgaggtctggctgtgcgcatctgagtataggactgtgtctgattgtacctgcctccgtgtctccgggatgcttgcctagactttgtctgcacttaactgtgggattggaggggcaggaggtggcagggggtgagcagtgtatgtgtggggggaggtgctggctgagagctgggactctggagtctgcctgaaattccagcctagctcttacacttcctgagtgtgtgacgttgggcaagtcacctatcctctctaagcctcagtgccttcatctggaaactggggataacatcaccccacctcccacggtggccgtctgctgtcggcaaatgctgaacaaacatcagctacttctattattattttcccggagtgtgaatgagagctgccctgtggggttgtgcaaagtggagttgtatctatgagcacaactatgtatgtgtgtgtcctgcctgggagggcctggcctcctctgcacataggcgagatcaggcctctctgagtcactcacctctagatcaagacttactctgcagcccccgacctcgggggttattgacaaggtatgtgtgtttggggtccctgtgcagacatgccccacagtgcagccgaacatgctgaacgtgcacctgctgcctcacacacatgatgacgtgggctggctcaaaaccgtggaccagtacttttatggaagtgagtagaggatggggactggtccctgggatccccatggtccctgtaatccctctgggtcctggacattagggtggggccagtgctaccctaatatccagggtttgggctcctctgtctaggaataacccccttggctctgctgttccctgagagccttatccctgttatccacagtcaagaatgacatccagcacgccggtgtgcagtacatcctggactcggtcatctctgccttgctggcagatcccacccgtcgcttcatttacgtggagattgccttcttctcccgttggtggcaccagcagacaaatgccacacaggaagtcgtgcgagaccttgtgcgccagggtgagcctaccccaaggaagtgaaaagaggaagcccagcccagcttctgcttctgcatctctggtttctgagatttgtcatgccacgtgcaagctgtataacatgcgtgtcgctccgcctgcctggactctccatttggagacctcctatacatcccacaaagccccacctgctgtgcatcctctgggaagcctgccatgcagggggcctctttcccatatctgggaactatggcctgggagcgacccctcttgtccttccgccagaaatgtgtacacaggcaggctttcacattcccagtatcacccaccctactcccactcctggctctgaccgctgaccctgaccttgcctgtcctggcacagggcgcctggagttcgccaatggtggctgggtgatgaacgatgaggcagccacccactacggtgccatcgtggaccagatgacacttgggctgcgctttctggaggacacatttggcaatgatgggcgaccccgtgtggcctggcacattgaccccttcggccactctcgggagcaggcctcgctgtttgcgcaggtgcgacccgggacctctcttgggcccacttcttcactcactctggctcctccctcgcccagtcaaaccccgccctctccctgcaatctcacaaggaccaggcccaggcctaggcctgttgaagccctgccccttgagtgagccgtaaagccagtggcttttgagctctggcctcagccggctatgcccagcccaggctgacccagctccggctggctccgccctctcccctaataggcccctcttggtgttctggccccacccactagctcgggtcctggctcctccctaaaccgggtggcaagtggatgcctaggctgccttaaaaacaggttcattacctgtgctcagaccccatccatcctcaggctgtggaagggggaacctcattcctggagtcaggcctgctctgcgctttgacagtgctggggaggtgaacctgggttctgatgttggacccgccctctccctgctagcccaaggtggtgagttctgaaacttccccaagcttggaaataagctggaggcctctctgtttcagccctacgtgtttttgtttttgttttttgagacagggtcttgctgtcatccaggctggagtgcagtggtgcaatcctaactcactatagcctcaatctcccggattcaagcgattctcctgtctcagcccccctagtagatgagactacaagagcgcaccactacgcctggctaatttttaaattttttgtagacagtctgcccgtgttgtgcaggctggtctcaaaaactcctgggtttaagtgatcctcctgttttggcctcccagaaggctgggatcataggcaagagccaccacatcgacctagcactgctttttaacctgtgctctgacctgcccctcccaagcagaggggagtttggtggtgagagggctgggcactaattcacactgccttttcctccctcatccccagatgggcttcgacggcttcttctttgggcgccttgattatcaagataagtgggtacggatgcagaagctggagatggagcaggtgtggcgggccagcaccagcctgaagcccccgaccgcggacctcttcactggtagggggcttggtgagggcagggccagccatggtgccacacactcagaagggccctgggcttgatatctgctctgttgtcactgtcctggaattcctatagtctgggaacaaaggccctgcatttccttttgcattgggacacaaattctgaagcccatcctgggtgggacatggccggctttgaaaccagggaaggtctgggtgatgggccaccccttgaacttggtgtgacctgcaggtgtgcttcccaatggttacaacccgccaaggaatctgtgctgggatgtgctgtgtgtcgatcagccgctggtggaggaccctcgcagccccgagtacaacgccaaggagctggtcgattacttcctaaatgtggccactgcccaggtaaccctggtgtccagaaccttcgagtccggtatatacaatacaatgagctctttccatggtacaggcatcccctaacacgttctccttatttttaatttttttgagacagtcttactctgtcacccaggctggagtgcagtggtgcgatctcggctcactgcaacctctgcctcctgggttcaaacaagcacatccagctaatttttgtatttttgcactggggtctcatcatgttgtccaggctggtctcaaactcctgagctcaagtgatctgcttgcctcggcctcccaaagtgccgggattacaggcatgagccaccgcacctggcctctatttttaacatttttatttatttattattatttttttttttttgagacagagtcttgctctgtcacccaggctggagtgcagtggcatgatctcagctcactgcaacctccgcctcccgggttcaagcgattctcctgcctcagcctcctaagaagctgggattagaggcacctgccaccacacccagctaatttttgtatttttagtagacagggtttcgtcatgttgaccaggctggtcttgacctcaggtgatctgcccgcctcaacctcccaaagtgctgggattacaggtgtgggccactgtgcctagtctatttttaacatttttattgagaattccttttttattttttttagactcactctgtcgcccaggctggagtgcagtggcacgatctcggctcactgcaacctccacctactgggtccaagcgattcttctgcctcagcctcccgagtagctgggattacaggtgcccaccaccatgctcggctaagttttatgtctttttagtagaaagggggtttcaccatattggccaggctggtctcgaactcctaaccttttgacccacagccttggcctctcaaagtgctgggattacaggcgtgagccaccgcgtccagcctttaacatttttataattaaaaaacattattttttcacagagataaggtctcaccatgtggcccaggctggtctcaaactcctgaactcaagtgatcctcctgccttggcctcccaaagtgctaggatataggtgtgagccaccatgcctggcataacacgttctccttaaaaaaatttttttttcctttctttaaaaattgatggctgggcatggtggctcacgcctataatcccagcattttgagaggccgagatgggcagatcatctgaagtcaggagttcaagaccagcatagccaaaatgacgaaaccctgtctctactaaaaatacaaaaattagtcgggtgtggtggcgcacgcctgtaatcccagctacttgggaggctaaggcaagagagtcgcttgaacctggcaggtggaggttgcagtgagccgagatcacgtcacttcactctagcttgggcagcagagtgaaactctgtctcaaaaaaaaaattgttttagattaattttttttttttttcttgagacagggtcttgctgtgtggcccaggttggtcttaaactcctagactcaagcgatcctcctgcctcagtctcctgagtagctgggattacaggtgtgagcccctgtaatcatgttctcatgccccctggaggaagatgctattctattcaccatcacaatgtccccctcctggatttatgtgcattcctcattagaagagatagcataggctgggcaagagatagcatggcatggtgactggatgccctcttctaggtagtgggtccaagagaactgctcaacaactggtggctacttttatctgtgtccccacgctcccaagtgccatacccccacccatgcctgtgcacccaacatccttgaccccatatacatcaaaacacagctatacacagggatggcccaggatcctctggcttcaggactcccctcttgcctgcagggccggtattaccgcaccaaccacactgtgatgaccatgggctcggacttccaatatgagaatgccaacatgtggttcaagaaccttgacaagctcatccggctggtaaatgcgcaggtcagtgcgcctaccctgtggtacccttgtgcacatgtgcgcttgcatccgggggccttgggttatgtgcatagctctcagtgctgtctttgttttctattgttctattgtggtcattctataacaaatgaccacacacttagcagctcaaaacaacagaaatacattgtcttacagttctgtaggtaagaagtccagcatgaggccgggcgcaatggctcatgcctgtaatcccagcatgttgggaggctgagccgggcagatcacgaggtcaggaattcgagaccagcctgaccaacatggtgaaacgctgtctctactaaaaatacagaaattagctgggtgtgatggtgcgtgcctgtaatcccagctactcgggagcctgaggcaggggaatctcttgaatccgggaggcggaggttgcagtgagcggagattgtaccactgcactccagcctgggccacagagaaagactctgtctcaaaaaaaaaaaaaaaaaaaaaaaatccagcctgagtctcaccaggctataatcaaggtgttggcaaggctgtgttccttctgcagtctctaggagagaatataatttccttgctttttccaacatctagaagttacccacattcaaaatctattcttggctccatcttcaaagccagccacatagcatctttctgaccctgtttctgtaatcacatccctttctctcattctcacctcttctgcctctctcttccacattttatttatttacttagagacggagtctcgctctgtcgcccaggctggagtgcagtggcgtgctctcggctcactgcaacctccgcctcctgggttcaagtgattcttctgtctcagcctcccaagtagctgggactacagtcgcgtgccaccacgcccagctaatttttgtatttttagtagacagggtttcaccatgttggccaggatggtctcgatttcttgacctcgtgatccaccccgctcggcctcccaaggtgctgggattacagatgtgagccactgtgtggcctaatttccctactttaagtttggctgatgaacaacctcaattccatctgcaaccttaattccccttttgccatgtaatctaatgtggtaataggttctggggatcaggacatggacacttttgggcagttatcattttacccaacacagatgtgttagtgttttgcactaagtggcctgtggctgtggctgtgtgcacagtcagtcactctcatcagcacagaaacttgtctcccctctcccatctcagacaccccttcccatcaatcttgtcctcactacggtgcaatctccattcccaccttccactcgctcccagcactgctatttcaccaaaacagctcttttatgtcatttatttttatttattttttctttttaaaattttatttatttatttatttattgagacaagagtcttgctttgtcacccaggctggagtgcagtggcatgatcttgcctcatggcaacctctgcctcctgggttctagtgattctcctgcctcagcctcccaagtagctgggactacaggcatgtgccaccaaccctggctaatttttgtatttttagtagaggcagggtttcactatgttggccaggctggtctcaaaactcctgacctcaggtgatccgtccgccttggcctcccaaagtgttgggattgtaatctgaggtgggcggatcacttgaagacaggagttggagaccagcctggccaacatggtgaaaccttgtctctactaaaaatactacaaattaggtgggcgtgatggcactcatctgtaagaccagctactcggcaggctgaggcaggagaatcgctggaacctgggaggcggagtttgcagccagctgagatcgtgccactgcactccagcttgggcgacagagtcagactcagtctcaaaaaaaaaaaaaaaaaaaaaagtttattgagcacctactgtgtacattgggggacacagctcgtgcaaaacaaacatccttttcctcacataggtcactttcttgttcctccaccttgctcaggtgaaagtgcacctccattcattataaaaattgtgtctaggccgggcacggtggctcatgcctgtaatcccagcactttgggaggctgaggcgggcggatcatgaggtcaggagatcgagaccatcctggctaacacggtgaaactccgtctctactaaaaaatgcaaaaaattagccgggtgtggtggcgggcacctgtagtcccaggtactcatgaggctgaggctggagaatggcgtgaacccaagaggtggagcttgcagtgagctgagattgagccactgcactacagcctgggcaacaaagtaagactccgtcccaaaaaaaaaaagttgtgttttttggtaacaatctgacagtcctgcaaaacgattattcctgccctataatgtcacacttagtttttccacaaaagtttttaataataaagttggaattattgtaaaagtttagtaaaatttcaggtttattcttgcatctctgaaatccttttaaaaaaggctagtggtcatgtttgacttcagccaaaattcattttcacacccaaccattggcttgcacgccaaatatgtatttagagaaactgaacctatgggatgcatgaatgtgcacacatgtgtggaagtgtgggcccccaggaaggtgcggactcccgagggctcactccgtcgcctcccccagcagcaggcaaaaggaagcagtgtccatgttctctactccacccccgcttgttacctctgggagctgaacaaggccaacctcacctggtatttggggaaactggggagcttgggggggttggcatgccccgtgggtcatgaccctgccctcaatgcccctgccgctgtaggtcagtgaaacatgacgacttcttcccttacgcggatggcccccaccagttctggaccggttacttttccagtcggccggccctcaaacgctacgagcgcctcagctacaacttcctgcaggtgggtaggagccgggctagagggggcatgcagccccgaggcccgacaggctgggcgccccaacatacccctctgcctccaggtgtgcaaccagctggaggcgctggtgggcctggcggccaacgtgggaccctatggctccggagacagtgcacccctcagtaagtgtcgggcccaagaggggaagaggtttgcggctgaagttggaaaccacccctaggccgcccccctcgagtttcttctttttttttttttttttttttttttttgagacggagtctcgatttgtctcccaggctggagtgcagtggtgcgatctcggctcactgcaagctccacctcccgtgttcacgccattctcctgactcagcctcccgagtagctgggactacaggcgcccaccaccacgcccggctaattttttgtatttttagtagagacggggtttcaccatgttagccaggatggtctcgatctgacctcgtgatccgcccgcctcggtctctcaaagtgctgggattacaggcgtgagccaccgcccccagccgtcctcgagttccttcttaaagcctctaagaatcctgcccgccagcaccggacctttcgcttccccttggggtctcagctgagtcccacagaacctcaccggactcattgtctatgagcagatgaggcgatggctgtgctccagcatcacgacgccgtcagcggcacctcccgccagcacgtggccaacgactacgcgcgccagcttgcggcaggctgggggccttgcgaggtgcgcggggcgagacttgggagacacgggggtggagacaggaaggggcggggccagggcctgggaaaggggacagagacaggtgtgaggcgtagccgagagccctgtggcggggctacaagggctcgtgggggcggggcttgtaggaggcggggaaagatacaggaacggggcggggctttggaggggggaaggaggcggggcgtgggcaagaggaggcggagacagctatggggtatagtcaagggcagcagggtggggctagaaggggttttggggcgactcttgagggaggcgggacagagaccggaacggggcggggcctgaggagaggggaggagtcaggcctggcgtcctgaacccaccggtccctttgcgctcttccgcaggttcttctgagcaacgcgctggcgcggctcagaggcttcaaagatcacttcaccttttgccaacagctaaacatcagcatctgcccgctcagccagacggcggcgcgc

SEQ ID NO: 594 - DNA, 3844 bp, Homo sapiens
tcatgcctgtaatcccagcattttgggaggccgaggcgggcagatcacaaggtcaggagatcaagaccatcctggctaacacggtgaaaccctgtctctatcttagtaatactttattaattagtctgggcgtgtggcgggcgcctgtagtcccagctacttgggaggctgaggcaggagactggcgtgaacccgggaggtggagcttgtagtgagccgaaatcacaccactacactccagcctgggcgacagagcaagactccgtctcaaaaaaaaaaaaaaaaaaaaaaaagctctctgattttagctgttaggtgggagatgggttggaggataccaaagccagcttgcaggctatggggataaagaaaacacctggatttcggacctactttataggtagaggttggcagacatgctgagaaggatggatgtggggtgtgagaaaaggggagacagcaagctgcgctcctcatttttaatttttatttatctatttttgagacggagtttcgctctgttgcccaggctggagtgcagtggcaccatctcagctcactgcaacctccacctcccgggttcaagtgattctcctgcctcagcctcctgagtagctgggattatgggtgtgcgccaccacacccggctaatttttgtattttttagtagagacggggtttcgccatgttgtccaggctggtctctaactcctaacctcaggtgatctgccctccttggcatcccaaagtgctgggattacaggtgtgagccaccgcgcccagccccaatccctatttttcagtctagtggatgagtggagggtggggccgtttgctgagatgcagaaagatcagggataggtggagagggagctgagggggcaactttgaggtccaagcgaggatgtcaaggaggatgtctgtctcctccaacaaggtaggctcattccagcctcacggcttttgctgttctgtcttcccatgtgcagaaatggcctctctgcatcttcacatacggggattttctcagccttctggctttggctcaaatctcacctccttggcgtccttcacccatccctccaactaaaatcccgaactcctccacctaaagactcaaattatcctgtttaaatcctgattgcgctgggcgcggtggctcacacctgtaatcccagcactttgggaggccgaggcaggcagatcacctgaggtcaggagttcgagactagcctgaccaacatagtgaaaccccatctctactaaaaatacaagaattagccgggcgtgatggctcatgcctgtaatcccagctactcgggaggctgaggcaggagaattgcttgaaactgggaggcagaggttgcgatgagtggagatcgcgccattgcactccagcctgggcaacaagagcgaaactctgtctccaaaaaaaacaaaaaacaaaaaaggcctgatagcactcaccactattgttaactttctatcttcccaatcagattgtgggctccagtagggcagggtccacatcttggtcttgttcaccactaaatccttagtgcctagcacggagcccaccatagagaatagactacatgaattgtagagtgagtgaataatcctgttggccgtatgcactgttaggagggtgtgtttgagatacagatgacacccagggtctcacattcttgcaggagggaaagagacgtcagccctgggtcccagaagaggccactgacccagtgggagttcagggaaggcttcccagaggaggtggaggtgacagctgcagctataagggaaggaagaacagagcgttatgcagcatgtgaaggctttggagacttgtgagggcacgaaccgggctcactatcccattagacaaaagtggctgaggaaggatgaaactgtgtctaactctgcctggtgaccgaaatcttgtccatgggtgacgcttaagaagtgaccctcggccgggcgcagtggctcacgcctgtaatcctggcactttgggaggccaaggcgggcgggtcacgagttcaggagatcgagaccatcctggctaacacggtgaaaccccatctctactaaaaacagaaaaaattagccgggtgtggtggcgggcacctgtagtcccagttactcgggaggctgaggcaggagaatggcatgaacctgggaggcagagcttgcagtgagccgagattgcgccactgcactccagcctgggcgacagagcgagactctgtctcaaaaaaaaaaaaaaaaaaaaaagtgaccctcataaaaaaattagctgggcacgatggtgcacactagtcggaatgctggggtgggaggatgacctgagtccgggagtcagaggttgcagtgggccgagatcgcgtcacagcactccagcctggcgacagagtgagaccctatcaaaaaatagcagcaggccaggcgcggtggctcatgcctgtaatcccagcactttgggaggctgaggcgggcggatcacgaggtcaggagatcgagactaccctggctaacacggtgaaaccccgtctctactaaaaatacaaaatattagccgggcgtggtggccggcgcctgtagtcccagttactggggaggctgaggcagaagaatggcgtgaacctgggaggcggaggttgcagtgagccgagatcgtgccactgcactccagcctgggagacagcgcaagactctagctcaaacaaacaaacaaacaaaacagcaacaacaacaacaaaaccatcctcccctcccgaggggacagaacagaaacgaatgggcgagtgccgggccaagcagtgggtctccagcaggtggcattaaaataggaattttggctggggacggtggctcacacctgtaatctcagcactttggaaagcccaggcgggcggtcacctgagggcagaaccagcctcgccaacatggtgaaatgccatctctactaaaaataaaaaattagccaggcctggtggtgggtgtctgtaatcccagcaactcgggaggctgaggcaggagaatcgcttgaaccaggggggcagaggttgcaatgagtcaagattgcaccaccgcactccagcctgcgtaacaagagcgtgtaactcttgtctcaaaaataaattaaataaataaataataaaaataaaaaagaatcttcattcatgggaagtcgagaacacatgaaaacaagtaaaggccgaagcgcagtggctcacgcctgtaatcccagcactttgggaggctgaggcgggcggataacctgaggtcggaagttcgagaccagcctgaccaacagggagaaaccccgcctctactaaaaatacaaaattagccgggcatggcggtgcatgccagtagtcccagctactcgggaggctgaggcaggagaatcgcttgaacccggaatgtggaggttgtggtgagctgagatcgggcaattgcactccagcctgggcaacaagagcgaaaccctgtatcaaaaaaaaaaaaaagaaaaaaaaaggaagaaaaggcctaaaggcgccgggcgcggtgggtcacgcctgtaatcccagcactttgggaggccgaggcgggcgaatcacgaggtcaggagatcgagaccaggtgaaaccccgtctctactaaaaatacaaaaaaattagccgggcgtggtggtgggcgcctgtagtcccagctactcgggaggctgaggcaggagaacagcgtgaacccggaaagcggagctggcagtgagctgagatcgcgccactgcactccagcctgggtgacagagcgagactccgtctcaaaaaaaaaaaaaaaaaaaaaaagaaagaaaggg

SEQ ID NO: 595 - DNA, 4126 bp, Homo sapiens
tgcagtgcagagttcctttatttgggggcagtgcccaggccagttggtggaaagaggcaggcatacaacccactgtcaggctggggggcccagcaggggcgatggaggagacgaggtggttgagggattttctcagctgcaggttccaggcccaggacaggaggagatgtcaggcatcagacactgagcctgcttggtgcccgcaggagccaaaaactggcggccagagtttttcccgcccccgccccccgcttacccacaagggtgcccagaggccaccctctgcatcctcctttcccctcaggatggagtccaggcccaaaggggtcagattctgcagaggccaaagaggacactcaggaaggtgacactgcctcagccagccaaggaccccctgcctcgagaggaggcagcagaggaagagcaaacactttaacacaggctgtggcgacccgccccacagcacacacggcacacagagggcctcaggcacagctccccttctcagagcaaaacccaactagacacaaggcccagctcctgcccacagccacagaaacgcgggccacaggcttgcctgggctggcacctactggttctcttccctgctggcagcatgaagggaaaagacacaggagggctcagctgggctcctagactggcccaggctgagtcctggtcccagccaacatctgacaaaggaaacaccccaactggaggagacaaaaggggtgtggctcacatggagcacgctgtcaccgtcctgagggcttgcccatggagaagacagcaccctgggtactgaaggggaacggtggggcaggaaccaggaggtgagctgggactcaggtacttgctgctggccaggtactcacagcgtctggtaggtgctgtccttggccttgaggaagtgcagcacaaagaaagccaccgcctgtaggctcaacaccagcacgacacctccgataaagctggccccgtcaaatccagggctgtgggcctcagggactggggggctccctgcaggggtgaggcagggcaggggtcatagcagtcactgtgaaccaggatcccagtcctaccctcataactggcacaagtaacctggaggccccggtcctcaatatggggtgcttaaaccctgggctccgtttagtccagatcccgcaggcagttgggaagcgcctggtgggaggaacagtggcaggggagggtggggtgctgtccagccctggctctgctcctggcttgctctgtggcttttatgccacccacattctctctgggcctcatgatcacatggtccaattggtggcttggaccagtgactgggctcccaccctccctgggcctcaccagcccaatagggtgaagacagagccagaactcagaccctcccctgctcacaattcctttcagccttggacctcagggttcagagccaagatgcagacgatatagtcccttttcaggactcctaagccctaagacctcagtgtcacccaatgtcagagccctcagagagggaaggagcagggggagaagtggaggccccaactgtcaccctgctaagtgggtaagcgaggactggacagtgtgtgtcagggggaacatggctgagggacaggcttggccaaagtcacctcacaggacatagccagactcacacagggtcccctgaccatctcctctgccccttagaaggtagggctttagggccatggttgccaggctatgcctgggtggctcccagctgtgccacggtacctgtccactcctagcagggatttgatttcaggccctgggctgggtgcccagaacagggcagggctggtggatggaagatcattctgggacagtggaaaggggcccagcctgaactgggtctccctcccagaaggtgtaaggggtggaaggagtctgacaatatgaagggcaaacagtggtcccagctcccgctcagggagccccagagaaggaagctgggggatgaggagcagaagaggggagaaatgagccacatgaggctgatccggggctccagctgagggagctgagccatcaataattcagcttctgagatcggtttctggctttaattaaccaagggcctcttcagccatccctgccaagtctggtgacctccagcccctgagagggagtgggaagcaaagggtggcattcttgcctctactccgccaggaacccgccttgtgaccctctctgggcctggagggtgcagtaggcaggcactgaggatgtctcctgagcaactcgagccacacaccctcacctccaaggacaagtcccgaggagtgaccttgagttcccagaactggcaatggggaggagggatgggaactgtcatttcttgattgccttcagtgagtcagacactgaagtgggcactgtacagcttctcataaaacctgcagagcaactctatgagaaaggcatcatccaacccatttcacagatgcggagacaggctccgagggagaaggcgcagggccgaggtcacagagcatgtcagtgcctgagcccagagctgtcttcccctgcacctctgctcctcccactgccccgtctccagggagtactcacctgttgtgactgtcttcggttcataggtggggtggtggtgagcagctgaggagacaggtgatccatagcaaagcagccttcccaccccctgactcccatcaagaccccagcccccactcaccgctaaacttccgattcagatgcagccctgtccctactctagacatccaacatacttgcaagccccacacagttccctccaccagatgtgctctctctccatctctaccttccaggctcattactgatgccacctcctccaggaagcactccctctcattccctctgaacttccaaagtccttgctatgccttaaactagaagaagagctaacactcccatcccctccacacacctgtactaattttcagatgaggaaataggcagagagaggaggggacttctcagtgagctaaaggcagaactgataccgggcccaggtatgggtgagcaaaatccaccgcctgagagaggctgtttcctcctggggggcaggctatggctggggagacccatgcaacttggcttaggtgcaagaacccccttacctggacatgcctctgagcggttgtagatggagcaaccttccttgaccacctcagattgggccacacagtgtcctggtgagagaaggtgcaggggggaggtttggggagaggggccagggccttggggttcagagctgggggcactcaatctggggagggctcagctccatacctggctcctctggccggcactgctcccacatgcagctggagagattgcgcgctctgtctccctccacgcagtgctcacagacctccagctgtttgcaggccccttggaccgccggccagatattcaggcggatcagggctcccctcccaaagcctcgagctcctttacctggtagtgcggtggagtgggaagggagaattcctcgaagccaagctgtggcacccgcccaccctcccacccaacactccggtggccctcgcccctctgcacacatctgggctctcacactcacccctggatccccaagccccagcgcacacctggagcttccacagcagaggtctacacacacctagagcctccccacattcacccagagcccctccctttgcatacacccggggttcccagattcagttggagccacctcccccagaccacctgaagctccctaggcccccacacctggggcctatatttacacacagggctccacacagagctggagccccctctcccacccctggaggcctgcacttggccggaaagccccctcccctcaagcccaggctgctcctggggagacggctggctgaggtgcaagctccatccgtccccgtcgagcccctagccagaccctgccgcgagttaccagccacagccagctgggcacataggaggaggcagcaacagccgccacagagcgcagtccgcaaggcgcggggtcccggagcctccatgggctcgcggggtgggggtggccgggggcggtggccgggatcggtggacagctgccgggcgc

SEQ ID NO: 596 - DNA, 341 bp, Homo sapiens
tttagtagagatagggtttcactatgttggtctggctggtctcaaactcctgacctcaagtgatccacccgccttggcctcccaaagtgctgggattacaggtgtgagccactttgccccgcctaaatttttattttttgtagagatgggttctcactatactgcccaggctggtctcaaactcctggcttcaaacaatcatcccgcctcagtctcccaaagtgctggaattacaggtgtgagccactatacctcctggccagttttttattttttaatatatacagggtctcactctgtcacccaggctggagtgcagtggcatgatcttggctcactgc

SEQ ID NO: 597 - DNA, 142 bp, Homo sapiens
agggaggagggatagcattaggagatatacctaacgtaaatgatgagttaatgggtgcagcacaccaacatggcacatgtatacatatgtaacaaacctgcacattgtgcacatatactctagaacttagagtataataaaa

SEQ ID NO: 598 - DNA, 5889 bp, Homo sapiens
ggttgctgtcttcctcgtccctccggcccttcttcctactcagcgtctcacttttggcctattttctgctggatctctggcagcctcgctttctccctgacgtttcaggtgagtgtttcttcattcagtaagcacccattgggtacttgcttggtgcctgattccgctgggtggggttaagtggcgaggggaacgtacagcaggccacctgcctcccaggcatggcccacttcctttttgtacggaattccctaaaatgagaattgcccctttcccaaactaatactactgtaggtgcagtggttaagatggtgaagtctgcagccatattacctgggttccattctctgttctgccatttaccattgctgtgaccttgtaaaagtagctcaatttctgtttgtctcaatttccttatctgtaaaacacagatgatagaacttacttcatagagaggtgaggagaggattaatgagttaatacacatgctatacttatgatagtgtttcacatataagccttataaatagaacgtcagtgtgtgtttttcttgttatccatataatttacttagtaggtgacaggctgtatgtgagttgcttgggagataagcatgagtaaaatctagttcttatgttggagaagggtaatgtctaaaggagacagacgcaaacaaaaacatgtaacagctcccccattggcatctgaagaaggtgctctggggctgcagaggagggacaactatttctgccttggggagtgtctccagggcccctaccactcaataatttgcccccctcctctctctctagcatcatccccagagagccacactctgacaggtgagtacaggccacctcttgaagacaaatgcccacatcctgtcctgcttgctggtgccagtgtcaccatggagcagggcagtgccccagcattgtgaatgaactggtaacaagccatgggtttttcatggtcctaggctcctgtgtaggtgtttgcgtgcctgctccttttggggcagagggttgggtcctcctggctttgcttctaagaccaggacagcctccttttgagaggtggggtcatttgcttttttagactaaagatatctttggcattctcagagggatttaagtgtctaggaagctggtatctgaggcctccaggggtcatgtcatgtctccccagtgagggtgcggggtcaggcgcccggccgcacctgctgagtgtgcccgagttgtgcagatacctggctgagagctggctcaccttccagattcacctgcaggagctgctgcagtacaagaggcagaatccagctcaggtaacctcccctacatcatacaacagttcactacactgaaggggaatagaggtggcgggggatgggagtggagtgatataaactccccgcttggagaccctgaaagaagaggcctgggcgccttcttgaggcaacattcacagctaatccctggtgcaggaggcagtctcacctcaggaaataagcttttgatagcctgacactttctcctgccaaggcagaccagtgtgaattacaggtggtgggcattatgtattgccagcttcctgaattggtggtcttgagcatcctcttaaccaaactggaccaccccattccttgagtacatacccatccttctaccagctgagcagtagtttcttacccagccgagcggggcgcatatctcagcgtgatgttcttagacttttgctcttctctgcagttctgcgttcgagtctgctctggctgtgctgtgttggctgtgttgggacactatgttccagggattatgatttcctacattgtctgtgagtagggtctgtccctgccctatttaaagccctctcctttcttctttccttggactgacccagagggaagactatgctctctctgctcagtttctgatttgtggagatctccagggatgctttagtattagtaactgtggaagacttacctggggaggagggcagtggatgtggcaagaagaggttggcacagccttgggaaaggaccttgcctaccttcagcacttcagtttagggaccagttgaatgggggctcttaggaaattggcgtagggagctcttagttcacgttcttaacccatagtgttgagtatcctgctgtggcccctggtggtttatcatgagctgatccagaggatgtacactcgcctggagcccctgctcatgcagctggactacagcatgaaggcagaagccaatgccctgcatcacaaacacgacaagaggagtaaggggctgccctaagccaggagggtgaaagagcgggagggccttggcttggggttcatgagatgccctggaattgagatcttctccagttctttagctgtgtttgtctcccctcccatcattcatgcttggtcattgctctactactcttgcttttctagagcgtcaggggaagaatgcacccccaggaggtgatgagccactggcagagacagagagtgaaagcgaggcagagctggctggcttctccccagtggtgaggtccagggaaagcgggggtgtcaaatagaaagccagaggaaaaatctttctgctttggagctgccacctccaaaggaggtggaagccagaggttttgggagaggggatgctcctgataaattggttctcttatcccctcacatgtcgtgttcatcctggttctcctgccaggtggatgtgaagaaaacagcattggccttggccattacagactcagagctgtcagatgaggaggcttctatcttggagagtggtggcttctccgtatcccgggccacaactccgcagctgactgatgtctccgagggtatggggagccctttgctgccctgctccccgccacaatctttgtgttccctaccatgggtacttactgtgctctctggcccactcactctctaattctctcagctcctaaaagaccttaacacctaaggcttggcccagctttccatgtcttgagttctcatccttgaactcattgtctgttgtggctaatcagaccagcagcaggcccattcttaattctttgttctctgcacagatttggaccagcagagcctgccaagtgaaccagaggagaccctaagccgggacctaggggagggagaggagggagagctggcccctcccgaagacctactaggccgtcctcaagctctgtcaaggcaagccctggactcggaggaagaggaagaggatgtggcagctaaggaaaccttgttgcggctctcatcccccctccactttgtgaacacgcacttcaatggggcagggtccccccagatggagtgaaatgctcccctggaggaccagtggagacactgagccccgagacagtgagtggtggcctcactgctctgcccggcaccctgtcacctccactttgccttgttggaagtgacccagccccctccccttccattctcccacctgttccccaggactcaccccagcccctgcctgcccctgaggaagaagaggcactcaccactgaggactttgagttgctggatcagggggagctggagcagctgaatgcagagctgggcttggagccagagacaccgccaaaaccccctgatgctccacccctggggcccgacatccattctctggtacagtcagaccaagaagctcaggccgtggcagagccatgagccagccgttgaggaaggagctgcaggcacagtagggcttcctggctaggagtgttgctgtttcctcctttgcctaccactctggggtggggcagtgtgtggggaagctggctgtcggatggtagctattccaccctctgcctgcctgcctgcctgctgtcctgggcatggtgcagtacctgtgcctaggattggttttaaatttgtaaataattttccatttgggttagtggatgtgaacagggctagggaagtccttcccacagcctgcgcttgcctccctgcctcatctctattctcattccactatgccccaagccctggtggtctggccctttctttttcctcctatcctcagggacctgtgctgctctgccctcatgtcccacttggttgtttagttgaggcactttataatttttctcttgtcttgtgttcctttctgctttatttccctgctgtgtcctgtccttagcagctcaaccccatcctttgccagctcctcctatcccgtgggcactggccaagctttagggaggctcctggtctgggaagtaaagagtaaacctggggcagtgggtcaggccagtagttacactcttaggtcactgtagtctgtgtaaccttcactgcatccttgccccattcagcccggcctttcatgatgcaggagagcagggatcccgcagtacatggcgccagcactggagttggtgagcatgtgctctctcttgagattaggagcttccttactgctcctctgggtgatccaagtgtagtgggaccccctactagggtcaggaagtggacactaacatctgtgcaggtgttgacttgaaaaataaagtgttgattggctagaactgctgcctccctgactgtgagctgccttccacaccctgcactgcactgtgttctctcctcacccttaacctgcttcactccagtctgttctggctgtttattaccttgttgcaaaacagggccgaagcaaggattaccttgacaaccctagcttctccttagccatcttccttgacagtgtgatctgtttagtgagatttagcatgtgtgaataaagtatatgcaggaggaaattgctttgtcttcccaatcggtagaaattcgggaccataaaaattgtgttttaccatgtggcctacaaccttaacactgctttcttaagaagtcttcacccatctacatgctaacaactcactcagcctggatttatctttactggggaagccaaacaagcaatagaggacctttacctgtgttagaaatgagttggagccaaggaacactgaagaaatagtatcttaacagttactgagtccattgtatgtgcttggctctgctctgagtgatttatatgtattaagatttttcctcacaggtcagatatatactgttactaacttcattttatagacaggttaagcttcctgaaggccacaggtcccagtaaattgtggagccagaacccaaacccaagaagttttggcttcagcaaatgcatcagacagcccctgtccattaatagggcacaggtaggaagatgcacaaggatgtgggaactatagagaaccaatctgatgccttggcttaacaaagagtggacatggcaagccttcctctttggggaagaaaagcccagaactgagcagatggcctcctttatgagttcatgtcctccgccttcagctggaggtaccatatggcgatgctacctgtctttctgctggaggtaccatatggtaatgctgcctggctgtctgctggaggtaccatatggtaatgctgcctgtctttctgaggttgacttttatgccatgtctttcctaagtgtgtaagaatttttctgtttgcttcacatttgactgagaatcattctagggtttgattgagcccctgtcctgtgccactaaaggaactcgaacttttcatcacttagagatttcagaggggaatggaaaaacagttctaatcaataagcaagcaattcaagaaaaatagaattaatcaggcaatgactgcaacatgtcctatctttaatctattttcttattaagcttggacattgacaatagaaccagaagcttgtagctggatcaaaatattctccataggcctggagtttcatgagggtctattcttttgttgttgttgttttggtttt

SEQ ID NO: 599 - DNA, 191 bp, Homo sapiens
gggccggggatggcgctgagcctgggcctgggtctgggtctgagcctaggcatgagtgaggccaccagtgaggcagaggaggagaggccacggccgagcggtgggacgcctggccacgacgctgtggctgcgctccgcggctgggaggcggtgctggcggcggcgcagcggttgctggtgtgggagaagcc

SEQ ID NO: 600 - DNA, 686 bp, Homo sapiens
gggtttttttttttttttttttgagacggagtcttgttctgttgcccaggctggagtgcaatggtgcagtcttggttcactgcaacctctgcctcccaggttcaaacaattctcctgcctcagccgtccaagtagctgggattacaggtgcatgccacgatgcctggctattttttgtatttttagtagaggtggggtttcaccatgttggccaggctggtctcgaactcctgacctcaggtgattcacccacctcggcctcccaaagtgctgggattacaggtgtgagccacggcgcccagcctcatgagggtctattctttacattcaccatggtctgatggttgctacatgtttgtctatgattttttttttctattatcaggtgtcttggccggttcatgccccacgatgaaagggccagaggttttcatatgagtaaaagaaaaaagcagaaatgtgaaacctacaattaggctaaacaaaaatcaactggaaaagtacaggctgaggggagaagagttggctacatgtttatgttaggggaggagggagtacattttagctatgtattcaaacagctaatagtttaatgttgctgcttataaacttaattttaggctgcattaataaaagtgtagtctccaaaacaagaaatgtgataattctagtgtcctgtgcacgaa

SEQ ID NO: 601 - DNA, 26166 bp, Homo sapiens
gccacgtctgcaagtcagcgtttattgctcaagcgtattaaacaaaaatgtagactgaaagagacagttcttttaaaccccatttttccggattttttaagcgctctaaaataagaaaataagaaagtgcaagccagcaaaaacgctccaagtgcctaattctgactctgaaacttgagctctctggtctgcccccaagaagacatcagcccgccccgggtcgtccctgtggctcccaccccattcccaggagcagaccccgccagcctcaaagctgcagggaggtgggggtggcctgcagacagggtggggtctgcatccggtaccagtgacagcagcctctcctctcccacggtggcgcttgtttggggctgtggccaaagtgtttgcccggcccctgactgtgtccttccggagctgccgaggactgcagagagggcctggcttgtcccctctaggagcagctgggaaggtgtcttgcctgcatcccccttcaatggttgaaaataatgattccacttgtcatgaacaccatgaaggtatcttggcagccagagtcactcctgttccgcagtgggaaacctgggagggtcctcaaaccccctggcagggtctgcaggccgccccatccagctgcatctcccaggcctcctggttctttgatcttgatggccccaggccacagatgcatctccgggcctttccagcagcccatgggggaccagtcaatacaccccacggcggtgaagagaaaacgttcatgtcttctcagatcagaaggaaagaaacaaaaccattgtgaaggaaaacacctgctggaaagtaattatcaaagtaacagcattccagtttcacagtcgccccaactcactgtggatttactgccgtcagctgggaggacccaggcgccctcgggacgaggagacgcagggaaacccactcctggccatggcactacccaaagccagtgttattctcacacccaactgtccctgcagcctggcaggtgggcagtgaccgcctgggctgtaccctaagaccccaaaacagcggagatggagaagaccgctgccctggggccttctcagtgaggatcaagacaaagtacttgctaggaggtagagggcgctgggtgaacctgtgagaattcctgggctctgacctgatctgtcctgcattttgagtaatgggagcaaacacaggagggaggggctcagcttcccccggtcactggggccagggagacgtggtccagccggtttacaaagccttggatgcagccccacccccaagaacactgcctgtcacagcagcggccacgtggcactccaagctgggcatgacagtgcccgggacgtgggcagcggccatgtggcactccaagctgggcatgacagtgcccgggacgtgggcagcggccacgtggcactccaagctgggcatgacagcacccaggacgtgggccggccagtgtggcggtggatccctctagaatgactgggtctaagtagggagacagggcaggcgacccggcgtggactggtgtggatttcacctgggagagcagcggcagcctgtgtcgcttgcgcccaggctctggaggaggggcccctgcggctcccgggccaggacagaggcgcccagccctgctctcactgtccaggaagagccgctgggcagcctgagcctggggcaggtgcaccttgcagggaagtgggtaagatcccactgggctgactgagtacccgggacagaccctaagcgtggagggaggaagcccggtcagagtgggcaggagacgcagggacccacagtctggtcaggtccagagagcccactccagcccaagccatgagagaggcaggaagaggagctggggccagttcaggggtggggctctcaagaggccgagccgggggcccttcctcggcctgggaagttgcggccatgctcctgctgttacgacacgggagccactcggagctgactgatctcactgaggcacagactagccaacattggcctattttaaaattaaactaccctaggaagtgaaaaccccacctgcagcctggtttgccctcacacaagggaaaagaggtgttagaagcagtagctcagggcgattaggggttgtgcgtttccatgcttggggccaggctgggcgctgccacccggtttccgcgtctgggggtcactgggccatttgcaccacgacggctctccaggctttctccttgtcgaactccttcagggggctcctggccacctgcaaccgagacaggaaaggtgttacttcaccagggccacctgtgcggcgggaaggtggacacgccactcggccacaggcagcgagcagccagcgttcagaagttttcttcgaatgtgaaggaagtggggaaactaacccctgggcctctgtggaaagagataaaagccttcacttcctcagtgtcccagaaacgcctgcatccccccccgcacacacggtttctaccgagcctgggatggagcagcccttcactcggccccttgccctggctctggggcggggagcggggggaggccgcccaaggttgggcatgtgcctgacggctgaggaagaaaacacttaaggcagaggtaaccagatgcctccaggcaaaagggaggacagcgccagccccagctgtccaccctgagccccagttgtccaccctgagccccagctgtccaccctgagccccagttgtccaccctgagccccagccacccaccctgagcccctgggccccagccgtccaccctaagccccagccatccaccctgagccccagccgtccaccctgagccccagccgcccaccctgagccccaaccgcccaccctgagcccaagccacccaccttgagccccagccgtccatcctgagccccagccgcccaccctgagccccagccgcccaccctgagcccctgggaccagcagttctgggatctggggagaacacctcatgcgtctgactctgggccttgctggtcacaacagaaacccaggcgggtctcatttcaggcccagggactgccgtcctagcagggagactgaccacagccaggaaaaatggcagcaaagcaactgaggaggcaggttaagggaacagcagtagggagggtggagggtgggggcgacggggtcagctgagaaacgagccaagggcaagagagcgtcctccgggacttagcgggcactggaggctctgcaccaaggttctgaggccggtggtgtgctgaacacaggagggcagggtgtgcagggcaagagcagcggccggtccgcccaggatggcctagaggtggggcaggactcagagccccgctgagtggctgcccaggtgtttgggcatcaaggtgacagtcctagtggtcactgcacctgagggtcagcgggcaggtttgcccaggggagcaccaccaggacccgtagctcggtggggggaagacgctgagcctctgcctttcagatgtgggggcagcaagacagtaggcagggcccgggggaacattgttcaggcagtgacagccagaagttgttgacaccccagctttacggagccccatgtgccaggctgggtgggcattgccttccctgcagaaccgcgtccccaccagagaccagggaaggaaacttcaggacctgtgggagtcctcacaaagccctcttctgtgtctctaagagcaaatctgaaagcattaagtccagaatatttcccagggatgggtctgggtttacccaggctttgtgtttgtatttttaaaagacattttacggctgggcgcggtggctcacgcctgtaattccagcactttgggaggccaaggcaggcggatcatgaggtcaggagttcgagaccagtctaaccaacatagtgaaaccccatctctactaaaaatagaaaaattagctgggcttggtggcgggtgcctgtagtcccagctactcgggaggctgaggcaggagaattgcttgaacccaggaggcggaggttgtggtgagccgtgatcgcgccactgcactccagtctgggtgacagactgagactccttctcaaaaaaaaaaaaaaaaaagaaaagaaagacattttacttcttcggggtttttctggggtgtttttaaaaatacaaagtggcacaatgaatcttcgagggccacgtcgtgtggccctcggaggccctcaccaggacaggagcccccaccgcaggcctctcacctccccagcgggtgctcctgtgggccactcacctccccagcacccctgaaacccacaggcctctcacctccctggctgagcacccctgtgggccactcacctccccagtgcccccaccccacaggcttctcacctccctggctgggccccccatgggccactcacctccccagcacctgcaccgcaggccactcacctccccggctgggcacccctgtgggctactcacctccccagcaccccctccccctgcaggccactcacctccccggctgggcacccctgtgggccactcacctccccagcttccccccaccccacaggcttctcacctccctggctgggcacccccgtgggccactcacctccccagtgccccctccccctgcaggccactcacctccccagccaggcgctcctgcgggccgttctgggtgtcccaggatgcaccctgcagccttgcactgaccttgaagcgcacgcactggatggcggtgcccgtgttgaggccggcctgcagcaggagcactagcagcagcagcagcagcagcacatcgtaggatggctgcaggcggaaggaggtgtgagcagagtggcccagccgccctccagcccaggagaccaaagctccctcgtgcccacggccttcacaaagagcaggtgccagggctcgagtcggagccccagtaacccaaacgcattgctatttcaacaacctgatgataatcattctagctcaattaatgaggtcaattctgctttaaattccatcagcttgtgttcaacatacaggaataaaagtgaccgagccactgccaggccccgtggacagtgctggctgctagtggtcaagtcgctccacccctcctgctccaacacgcgcaaggctcagtcccagagccagagagaatgtccgcgggaggcagaagcgctgaccgttccgtgtcagcaggatcctgagcggaggagacagggggcagccgtcctggggggatggggtgcacagacccccaacagcttcacccctgagcaccagctgctaggaaggaaggggcaggaggcagcgcggtgagctcggcagggaagaggatggagggagcggccgaggatgcagggggccagagagtgaccacggagcacccaaaaccctctgtgcccatggatagctttcccgtgttggctcaagaaaaacaaagcaactaaatgttaacacacaaaagagccaaacatctatccaatgtcactgctacaaaaagtaagagaagaaacagaacgaacagctcttctcaagttaacataaaacttttttttgcgacagtctccctctgtcacccaggctggcgtgcagtggcgcgatctcggctcgctgcaacctctacatcccaggttcaagcgattctcctgcctcaacctcgccagtagctgggattacaggtacccgccaccacgcccagctaattttcgtagttttagtagagacggggtttcaccatgttagccaggctggtctcctaacctcaggtgatctgcctgcttcggcctcccaaactgctgggattacaggcatgtgccactacgcccggcctggattttaagtaattattagaaagtctggtacttgtgttcccagctggagtttaccctggaggatggtaaaggcatgggccccatgtggtctttgctcttcggttgttgagacaccatttattgcaaagcctatgctttcctcagtctcaaaaaaaaaaaatccagagccattaaagaaaatattaatcaacttaactatttaaaaaaatagctttcacataacaaaaatcacaacaagcagaacaagaaatagccgccaggctgagaccaccatttgtatcctccatcacagatggagctggtctcccccggcaccagggttagcggaaaatggtcaggagacatgagcagagtccactgaaaaagcaatgcagacgtcctcatgctttgtaagaggtcctcgtcctcacccacattgagacggaggtgctcccacccgtgtcaccgaactccagcgtgacaccctctgtggggggctgtggagaagtgagcaccttcacgccattggcaggagggaaggtggacggcccccattgaggaggtcgccgagatttatcagcatgacagctgcacctaccctctacccagcagtctctctcctagctggatatcctaaagatgcgctgaggattcaaaaggaagatgcgtgcaggttgttcacggaggagttatttatagtagcagacggttggaaataactcagtttccatcactagggactggctgggttgaccgggcagtcaggagcgatgaaggaattcagaagagctctgatccccttgggtatcgagaaaacaccaggataaattattaagtttaaaaaaacaagcaaggggctgggcacggtggcagaagcctcctcatcccagcactttgggaggccaaggtgggcggatcgcttgagcccaggagctcatgaccagctcaggcgacagagtgagaccctgtctctgaaaaataaaataagtaaatacataattaaaaagcgaggtacatggctgggcacagtggctcacgtctgtaatcccagcacttcgggaggccaaggtgggcggatcgcttcagcccaggagctcatgaccagcccgggcaacagagtgagaccctgtctctgaaaaataaaataaataaatacataactaaaaagcgaggtatatggctgggcacggtggctcacgtctgtaatcctagcactttgggaggccgagacaggcagatcacttaaggtcaggagttcaagaccagcctggccaacatagtgaaaccctgtctctgctaaaagtacaaaaattagccgggtgtgttggcatatgcctgtaatcccagatgctccggaggctgaggcaggagaatcacttgaacccaggaggcagaggttgcagtgagccaagactgtgccactgcactccagcctgggagacagagtgagactctatcttaaaaaaaaaaaaatggcaaggtacagaatagtgattctagtatacaagctattttgtaagaaagaaaaaaaaattatcatctggttgcccataagaggagcaggtcagtcaggcatgagaccacagcttttctgagctcgtcttttatagtttggcttttgaaccacataaatattttatatattcaaaaaataccattttaaaaagaaaaaaagcaccaagccctaaaatggaatacaaccagaggccattaaacttaatggggtatcgaacccagaggataaccccacacagaaaggggccgacttcgatggcgtgtggccgtcccctgctagcagaatgcatgctgaagataaaagggaagcctcaggctcactcaggagatggcccctgggtggtaatattgtctcttgtaatcgtgaacaattatatgcatattgtaagacaacatgaagtaggagatatattaaatgtcacaggaaacaaaataattggagtaggagtgggtgaagcaaacacaagagaagtgaagaaaaaaccctgggccgggtgttgtagctcactcctgtaatcccagcacctgtgggaggccgaggacgctatcccccttcagacagtgactccatgcccccatcagacagtgactccatcccccatcagacagtgactccattaccccattagacagtgactccatcccccgtcagacagtgactccatcccccgtcagacagtgactccatcccccgtcaggcagtgactctatcccctgtcaggcagtgactccatcccccgtcaggcagtgactccatccccccatcaggcagtgactctatcccctgtcaggcagtgactccatccccctgtcaggcagtgactccatccccccatcaggcagtgactccatccccccgtcaggcagtgactccatcccccgtcaggcagtgactccatcccccatcagtgactccatcccccatcagacagtgactccatcccccatcagacagtgactccatcccccatcaggcagtgaccccatcctccatcagacagtgactccatccatccatcagacagtgactccatccatccatcagacagtgactccatcccccatcagacagtgactccatcccccatcagacagtgactccatcccccatcagacagtgactccatccccccatcaggcagtgactccattccccatcagcacacgcatgttgacctggagcaaacagcttaatacaggtcttctaatgatttgggtgcaaaaccacttatactggaaaaaaaaaaacaaaaaaacaaaaaaacactaggtatctaagaaatacatctagctacacgtgcctgagcctcagaagtcgtgttggagataagctcctactgggtcagctcaaagtaacaggactttgaattctccttaaattcacctgttaaactcaatgcagttctgatgcaaatccgaaaagcatgtctcataaacccaggacagattctaaaatgggctcagggacagagtgggtcccaggtccctgtgaagcaggtggtggccccagatacagggcggaatcgaggccccgaggccctggggccaggctggcattggggagcacggtcaccgctgcccaggaacagcggaggaggtgcctcctggagctgtccctggagccagcgcccccagagtcccaggcaaagccagcaagggccaggccaacacgcagagcaccacatgtctggggggctctgaaataaaatacaactcacttttatggctggcgggtaatccttaaacatctccacgattctcatgatgctgaatgacagatatccagaggctgtgaacagcagcggagacgtgaggctgcttatggcaatcaggacctccacctggaaaaaaagcgcgggttgcaggaccacggccggagcctgggagcccaggacagcgggcgtggccagggctgggggggcgggcatggccgggcactcatgggcatagtcccaagctggttccctgcatgactcctgctgaaacctctgccttttcttttttctttttctttttttttttttttttttttgagacaagtctcgctgtgtcgccaggctggaatgcagtggcatgatcttggctcactgtaacctccgcctcccgggttcaagtgattctcctgcctcagcctcccgagtagctgggattacaggcgcccgccaccacacccagctaatttttgtatttttagtagagaccgtgttttgccacgttggtcaggctggtcttgaactcctgacctcaggtgatccacccacctcggcctcccaaagtgctgtgattacaggcatgagccaccgcgcccggcctgcctttctttcttttttgagaggcagcctagctgtgtagcccaggcaggagtgcggtggcacaatctctgatcactgcaacctctgcctcctgggttcaagcaattctcccgcctcggcctcttgagtagctgggattacagacatgcgccaccacacctggctaattgttttgtatttttagtagagacagggtttcaccatattgtcaggctggtcttcaactcctgaccttgtgatccacccaccttggcctcccaaagtgctgagattacaggcatgagcagcctgccttttcattcacagcacagtgccacaagttttgaaatacttaccatctaggcaaggtggctcacatctgtaatccaagcactttgggaggccgaggagggcggatcacctgaggtcacgagttcgagaccagcctggccaacatggtgaaacccccatctctactaaagatacaaaaactaagcgggtgtggtggcgcatgcctgtagtcccagctacttgggaggctgaggcaggagaatcgcttgaacccgggaggcagaggttacaatgagctgagatcgtaccactgcactccagcctgggtgacagagcaagactctgtctcaaacaaacaaaaccaagaaacaaaaaacatttacctgcaattctccactcttgaaaaaatagcccttccgcatgggtcacctccttcactgctctgaagtctgtccttttaacccaccccaaatcttcctgtttgacccatcaagtctcagagacagccttcactcatgccaagcatgggcagtcaccttgcaaagcactcagggtccacattttggcagcagtcattaacgatcgaccagttcaattgtttgcggtcagtttgtggcagtttcggccgggcgtggtggctcacaccggtaatcccagcactttgggaggttgaggtgagtggatcacctgaggtcaggagttcgagaccagcctggccaacatggtgaaaccccgtctctactaaaaatacaaaaattagccgggcatggtggcaggcgcctataatcccagctactcaggaggctgaggcaagagaatcacttgaacccgggaggcggaggttgcagtgagccaagatcgtgccattgcactccagcctgggggacaagagcgagactgcatctcaaaaaagaaaaaaaaacaatcgaccagccttaggaggtgcagatgatgctcagacactggtctccttccaagggttaggcacagagagcgcttccagtgtctacaccaccttgttcaggtctgcctgtccctgagaacagtccctgctgagcgggccagcctccacctcccacaaccccaccttcctcattgtgcaggccctgcagcccagtcactgcgctctcttgggctggagcctggtcacatggcaccaagggagggctaggccaggccctggccccgctcggtgggtccctggcacccagggctgaggggttcacccaccagacacttgctgggacactctgctgccacatgactggcaatggcacttggaaagcactaagagaaaagaaaaaggaaagattttagaggaaatagtcgaagaagtcgaattccaaacatgtgccctcccaccagtgacccctccatgcaggctgcctggctggcttgctgtggggggcaggggggatggtgcagtgcccaaaggcgcagctggggcagggacgggtccgcagggaagcaggggtagcctctcagaggttttgtgtgctctctgttcctcaaccattggtttaaaattttaagcctgtagaaaagctgcaagagcagtggagggggcatctgaggccccaaaatcaccagagtccttgacattcatatctgtgctctctccagctctcccagatagcctgatgcctgaacacctgagagtgctggctgagcccagggcacactcttgcacacacccaaagcaggaccacgctcgagagactccacgtggggccgatgtggtccatgcccagattcttccagttgtcctcatcatgttctttctttttaattttttaataatttttctttcttcttctcctttttttttttaagatggagtcttgctctgtcacccaggctggagtacggtggcgcgatcttgactcactgcaacctccacctcccaggttcaagcctcctgagtagctgggattataggcacccaccactacaccaggctaatgtttgtatttttagtagagacggggtttcgccttgttggccaggctggtctcgaactcctgacctcaggtgatccgcccgcctcggcctcccaaagtgctgggattacaggcatgagccaccgcacctggccctggtcatgttatttctagagctgtttgtttgtttgctcctgatccggattcggtctgccattgagctcgtagtctccttgtgggtccctgttaatcggggagtccctcagcctctgtcacctccgttacctggtcgcttctggggggtgcagcccatcagctgcagtcgggcctccgtgtgggacaggatttcctcatgatgagccttggggagcctcggaggagactctgcagtgccccagggtgtggactgccccttcctgatgacgctgacttgactcactgggttagggggatctgtaggttcctctgttggatgggcacctcttcctttttataaccaagaaatgcccttttcccacttattgtgaggagcctgccttagttccgcacaatgtaggcagagggaggatgcatgctcttcatcctcttcatctccccgaaggtgtccaggtgccagcaccccagcccggcctgctggggagggggctgcatcagccaggggctgtggtgagagggtgggcaggacagagatgggctccgagcaggggagcctgggcagcagggagaagactggggagctgaggggctgccagtgcaaaggccccaagccagctgctgaggtgggtgtggccctggccagggaggctgaggtgtcaatacaggggtctctcctgggcttggtgcttctgaaagggccttctagctgtaagcagcagtgagggcacaggaagggatggtggcttcagggtggcctattcagggccccagtgagccatgggagggcgggagtttccccgttcacccagcatggccactccggcccctgccctagagggccaggaagctcagccataggggctggggcagctcaatcaagggccctgccctggaagggtccaggcctgcagcccagcccccaactccagccccgagcacctgcctccagcccatggtgcagggcctgggcccctctgccgcacccaggccagactcaggcaggtggagctgggtccctcaccacgcatgcctcagcgctctcctctcctcctggggtctcctgccctgaagagagggttgggagtgtgggtggatttaggggcgcccagggggcagcacctgatgggcagggggtgctctccgggaagatggagagagcagagccacccccgaggcaggaggggtctgcgggatgggaggggcctctgtgatgagggctgactgcagggacagggaagggggtagggcaagtgcctttcattctcaactttttggaggtatgtggtctctgtcctccctcagcttcgggatgtaatccctgcgtttcagaccccagggtcagttgtacacacctgcaggcgtcattctctctgtcacagacccgcttgggtgggcacccatgtgagttctctgtctcagtagctgggcctggtcctaccccttccgggggtgtggctctatcccagctcggtcctgcctgggtctctttccctctctgagcgcctcagcagcccactaggtcgggcactggtgccctgggggcattgctctgtgcctactcgcccccacagggagctgaaacacagctgctgccaatgggatgtgtccacctggcaggcgtgggccccttctcggcagtccacccggccacaccgttcccgggcaggcgtgggccccttctccgcagtccacccggccataccattcccgggcaggcgtgggccccttctcggcagtccacctggccatactgctcccaggcaggcatgggcctcggcagcttcaggaagagccccactgctgcccaggaggagcctgtagctgatgctgggtgctcaccattcctgctcatgtacataagagagcaggggcaaaatctaaaagtccacacagcatgagacaaaccaggggctggccgtcaacaccggtgtgcaggccactacgcggcaaggtgctgagaacctcgtggggtctgcgtccggaggcaggtgggtggtggctctgggtgggctacaggctgtgaggggatctggggtgtggaggggttgctctagactcactgttctgagggaacacacctgtaatcccagcacttttgggggccgaggcaggcagatcacttgaggtcaggagttcaagaccagcctggccaacatggcaaaacccggtctctactaaaaatacaaaaaaattagctgggcatggtggtccacgcctgtaatcccagctacttgggaggctgaggtgggcaaattacttgaacccggggaggggcagaggttgtagtgaggtgatattgagccactgcactccagcctgggtggcagagtgagactccatctcaaaaaaataaataaataaaataaataaaacaatgcccatgtattgagcatgtggcatgtgtcaggtgctgtgtgacacatctgctgcagtaacatttaatgtaaagtaataacagaaatatgctgcattgtatgaaacacatagtgtaatataaatgcattatatattagaaaattatatagaataataaacatctacagcctgacattcatatgttaaaaagattagaataataaaaataattggtatttttttcaggaaaaataatataaaataatcacacaaactaatataaaagcagttaatactttgactcatttaatccttaactccccagttcttctgaagttgggggccagcgaggaccctctgtggtgactctctgtctgaatgcaccaagactgagctcggggcccagccacgcaggatctgagcagtgtggcccagagcggcggcgggcgggccagaggggttactcacggccactaggatccaaaagaacgtcactgagaggtgtgggcctgaaactgagtcatccacgttcagggcaatgatccccccgaggacggcagagatgcctgcgattacctcgacgacctggaggggacaggacagcatcggctcataaggaagtggagacacccccagattcccagaatgcactgtgcagacatggacccccaggagcagggtccagtgggctggccccagatctaaccgtggaggagcccacctggatggacccccagcctcacctggcccagaccccctctgccctcagctgcggcttttcacgtccctcctggagtaaaatagccaaagaggtgtttcccccactgctgcttttgtccacagaaactgagggtattgacctgacagtggtgagggcagaaaaccaagaccctcagactcccttccctgtctcacagtgtggcaggcggcggtgctcagaccctggaccccatcgaagggactcgggaaaacaggcctggggcagaagtagcttcccataggacacacccacccgtgccatgtgggtttgccattgccacggcaacactggacgtcaccacccctttccgtggcaatgatccaaccacctggacgttagcaccccttttctagaaatttctgcataatctgccccttaattagcatatacttaaaagtgggtataaataggaggcagagctgtctctgagctgctgctcgaggcacctgccggttggagagccctgctatactgccactgcaaacaaagctgctgtctgtcacctccagctcgcccttgaattctttcctggacaaagccaagaaccctgctggcctaagccctggttgtggactcatctgcccggcaccatcagggccgcaaccagcaccgccagactcagggaggggccgcaaccagcaccgccagactcagggaggggccgcaaccagcaccgccagactcagggaggggccgcaaccagcaccgccagactcagggagggctggggaagaaacacacgcccgaaaacctgctcccgtgaaggatctctgtgagtcgcaaacacagagctgtggccagcaggaaagccaggcataaggagtgggccagcaagggcttgggggccggaagggacctgggcagccaggccttgcgtccagaaggcacaaaactccagatgcacaaataaagctgaattcccagccaggcacggcggctcatgcctgtaatcctagcactttgggaggccgaggcagacggatcgtgaggtcaggagtttgagtacagcctggccaacatggtaaaccccgtctctactaaaaataacaaaaattagctgggcgtggtggcgggcacctgtaatcccagctactcgggaggctgaggcgggagaatcgcttcaactcaggaggcagaggttgcagtgaaccaagatcacaccactgcactctagcctgggcaacagcaggactccatctcaaaaaaaaaggaaaaaaaaaaaagaagcagaacggaaatggaacctaagagaggactgaaatgctaaataaggggaagtgaaggcactgggaaacacacacagacacagtcaagcacacaggaggctgtcccattgttggagtaaaaaggcaaaatgtcactaaatgtcacaagctagacaacaaggccaaggcggagggaagggggacagaccccgcatggtctgtttatcaaggagcgtattagaatatgaagggcaacccccaaaagaatactgaaaaatttcccatccaaaattagagggaaaaggaaggacggagcctctgccaattcaaaagaaggcagggaaggagggaaaaaggcaaaatcagggaaaatggaaaactcaaaagatggtaaaaataagtagaaatttatcagtaataactctcagaggaaatgggctacattcaaaaagctagggagagagaatgacaagataaagaacaaaatacagttacgtgctgcttataacaattataccaaagtacaaggcaagaaaagttgaaagtaagaaggagaaagaggccaggtgcggtggctcacacctgtaatcccagcactttggaaggcctgggtgggtggatcacttgaggtcaggagttcgagaccagcctggccaacatgccgaaaccctgcctctactaaaaataaaataattagccgggcgtggtggcatgtgcctgtagtcccagctcctcaggaggctgaggcaggagaattacttgaacctgggaggcagaggtggcggtgagctgagatagcaccactgcaccccagcctggctgatggagtgagactccgtctcaaaaaaaaaaaaaaaattcctcggggacaacagtgtcaactcacctacggcagtaacaaactccccctaaaaattacaggacaccagcagcacctttcgcgataaggaaggttattaccaatgataccaataacagactagagtctccacagatgaggcgcacgccgccatgcggtgtagacagccaactcttcgccaactcggaatcgaaacgtgacgtttaatccagcctcagtcacccccgacagagtatgagagaaaagagaaagaagggaagttttcttactgagtaagatttcaggacccgagcaggaaatggcacttcgtccagaatgttggcgctgtcagacatggagccctacgaagaaacagaactgtcaccccgggtgcacgggcacagggactcagcactgccgctggcatccggccgccgtgggcagtgggtcaggtcagcctgccgtgtagatgcgagaccgccttggaggcgcccgtggatctttgggcttgaggaaatgttcacacacattgtccttgcatatgaaaattagcagatgtggtgtctcctggtgatcccctggggacgagcactggactgagtcaggcttagggggaggggagggtacagcatctgtcttcacctccctgtagccagcggccgccaacccctcacccagctccagagcccctcctggccggggtttctgagacccaggagagaggggtctcatgggaatgccctggagcagcccagatcggccctccgagggtgacgctgagacccacctcgctcaccctggggtgatgcctctgcaccccctgccctgcggggtcagaagctgcacccaccttctttttcttgcagtcctcctcgctggaccgtgcagcgatgatcaccgtggccgccatgagcagctccagcaggagcagcaggatgaggttgaagttgatctgccaaggggcacacacgcttcagcaccgggcccgcctttctcacgccaccgcgcttcagcgtccaccggaccacctcacgggcaggctgcgcaggactctcagccacggtccccacttttcccatccagggccagctgtgaggcactgtgggctgcacactctcctgcctcacatgggcctttggggtcttttagtttttaaaaccattcttagtgcaaaggctgtacaaacacaggccagggctggatttggccttgggctctggtctaccgaccccattctgaacgctccttgttcccacaaaagccttcacggaatgtttagagtagcttcatgcatgattgtcaagcactgagaacataaggttttttggagggtaatgaaacgactgcaggccctgaccgtattggcagtgacatgaatttatatgtgtgttaatattcatagaagcatacattttaaaaagtcagtgtagctgtctgacaattttttttttttttttgagacggaggttcgctcttgttgcccaggctggagagcaaatggcgcaatctcggctcaccgcaacctctgcctcctgggttcaaatgattgtcctgcctcagcctcccgagtaagctggggttacaggcacctaccagcacgcccggctaattttgtatttttagtagagaggggtttctccatgttggtcaggctggtctcgaactcctgacctcaggtgttccgcccacctcggcctcccaaagtgctgagattacaggcgtgagccaccgcgcccggcctgacaatttttaaaatacatttaaaaaagaaagagtgcagaaccacattcaactaaaaacagagcctcgaaatatatgatgtcataacagagccacaggaagatgtagatatatcagtagaggtggggaaggacttgaaacacttttcttagaaactgacagatcaggcagagggaggcggctcacgcctgtgatcccagcactttgggggaccgaggcggttggatcacctgaggtcaggagttccagaccagcctgaccaacatggtgaaaccccttgtctactaaaaatacaaaaatcagctgggtacggtggcgcacgcctgtaatcccagctactcgggaggctgagacaggagaattgcttgaacccgagaggcggaggttgccgtgagccgagatggagccactgcactccagtctgggcgacagagcgagactgtctcaaaaaaaaaaaaaaatgacagatcaaaaagacaaaagcataaggagaactctaaaattcagaaaagtgtgacattaaccttgtcttttattttctgtatttctggtgctttgacctctggctccttcctgatcctgaagagacagctcctcccagggccagccgacagctacagtgagtaacttgcctctgagcagttcagatacaagccactgacccagggaccacaccccatctgctctccgtcttaataaagaagcgtcacaggccgggcgcggtggctcatacctgtaatcccagcactatgggaggccgaggtggatggatcacctgaggtcaggagtacaaggccagcctggccaacatggtgaaaccttgtctgtactaaaaatacaaaaattagccgagtgtggtggcacacgcctgtaatcccagctactccagaggctgaggcaggagaattgcttgaacccgggaggtagaggttgcagtgagccgagatggcgccactacactccagcctgggcgacagagcgagattccttctcaaaaacaaaacaaaacaaaacaaaaaggcagtgtgggtgttcccactgggtcctcctgtgtctgctcatttttcctgcccaacgagagtggccaggacatactcaagcctcctccagctttccccaatcatcaagtgcattccacatgtcacacaaagcaggaggccctccttgcagtatctcggatgaggtcctggtttcctttgggatttttgtctttttttttttttttttttttttgagacggagtcttgctctgtcttccaggctggagtgcagtggcgccatctcggctcccacaacctctgccccctacaatttcacatttttgtttagaggtgcattgaacaactgtcttacacagattggatgaaacatagtattatgtcactgttaatttttaaggactgttggaaaagacattgtttaccaataaatctgtcccgcagaatcacgagacttcaataaagacaattattttctttggatgcataaatctctcaactttagtcaaactcacgagctgtgaataacatttaccacctatttccagctcaacaaacatttgctgacaccattcgtgggagtggggctgtgggtgtcaggcgtctgcgcgaagctcgtgtgaactcacgtttattgctgatgggttcaggactagtttgcatccaaaccaaattaaacacgtagtggtcacagcaaacgtggaaacaaacaatatctgaaagttgggaatctgaaaaacaaggcaggaggggttttccttctttgaataataaaagaaaaaaggtaacagataaaccacacttcaggccattcactaaaaattatcctgattaggacataatggtggggagtcctgcgtgctcagcccgctctcccctctgtgcggcaaaggctgggctgggcaggagctttactgtctggggggcaacctcgggggcccctctcggtgccacaacgtctgtgcgtgggcacacacacaagcacacatgggcacactgtctgtcagcccctccggctttctccctggcagaggctgcctgcaagctagactcaccacattggcgttcctcctggagacggtgaagctcacaattgccgaggggatgcactggaatgaaaccggaatcccatgagcctgccgctcacctgagcaactgagactctgaaatactctaacatttgcgcttccagaaggatctgaatcatattcacaaaacagtgttgccagtccatgcaacacagtgggttggcttgactagaaggcccccaggtacttctcagttttaattttttcttgagatggggtctcactctgttgcccaagctgatcttaactttgggctcaaatgatctgttcacctcagcttcccaaagccctgcgattacaggcatgagccgctgcgcccaacccccaggtacttcaaaataatttattctgaaagaagtttttatttttctgatgtgctaaaaagatatttgttaatgaaggctcttctagctggataagctttgaagcctagaatgtaactcacgcaggcacaagacctggtctttgctgaaaattacccaaaaaaggaaaaagtatcagccgggtgcagtggctcacacctctagtcccaactactccggaggctgagctgggaggatctcttgagcccaggagttcgaggctgcagtgagctgtgaatactcggtgatagagtgagaccttgtctcaaaaaaagaaagaaagaaagaaagaaagaaagaaagaaagaaagaaagaaagaggaggtctggtgcagtggctcacacctgtaatcccagtactttgggaggctgaggcgggtggatcagagtcaggagtttgagaccagcctggccaacatagtgaaaccccatctctactaaaaatacaaaaaaaattagctgggcgtggtggcgggtgcctgtagtcccagctactcaggaggctgaggcaggagaattgcttgaacccaggaggtggaggttgcagtgagcagagacggcgccattgcactccagcctgtgtgacagagcaagactccgtcaaagaaagaaagaaagaaaaaaagaaagaaagaaagaggaaggaaggagcaaaggaagtagcaagactctgcatgtgagggaggcagaaaggagtcccacagccttcttgtcctcagccttcttgtccccacagggccacaccaaggctaggagtccagggccagggagggaggttgggacgtcagggacagggaggtggatggagtcgggccagcccaggcctgtggcccttgccgtgcagggccttgctcctgcagccatgggaccccgggccctgagtcgggggtgcaggccctgaggggctgagcacagcagtgctgggtgaggaggcagaagaagccccgtcggggcctgagcgaggggcagagctagggccaggacagccaggctcagctcagcacccactcaggtgccacgagggcccagggtagagaagaaaggccgggggcagggccgagtggggccaaggctgggcgggggtgggcacttgcccatatccggcagccgctgaggctgaaggggcacagctcacagctccactgggacaagggcggctcccatggtgaggataaaggccacggagaagcttccagagagggcagcagagtgggacgggtcacctgccccaaagggctttgttctaagggagcagagacccaggacagcacggggcggggcatccactttgtttttaagacatttcgggggcgctgctggggacagtcaccaacagtgtccctagagaaagggcaggggccagagacccagcaggcatgtggaagcgagaggaggggagagctcgggaccagctgaagcaggaggggcgtggggtccgcggcttgcgggccagaggggcatggggtccgcggcttgcgggccagaggggcatggggtgcgcggcttgcgggccagaggggcatggggtccatggcttgcgggccagagcccaggggtcagccagcatggtgctctagctgccgggacgctggggaggcagtggccggggttcacagaggaccaggggacagcggttgtctgtcctcccttgctctgaggatcagtgggtgcctccaccggccttggcactgtgtaagtttctaaaaacacaacatgaagctttgggaggatgtggggcacaggtcccagtcccctgagggcagatgctgccagctctggcaggacgcagccgcaggctcagaatcaacacgcaattccctgcacaggcgtctgcagagcaaggttcaggcctgcttcatcagtaattctcaaaggtgatgaactctacgtgaaactaaagtcatatgaagagttttttgtttttttcttgttgttgttgttttgagacgaagtttcactctcattgcccaggctggagtgcagtggcacaatctgggctcactgcaacctccgcctcccaggttcaagcgattctcctgcctcagcctcctgagtagctgggagtacaggcacccaccaccgcgcccagctaatttttgtatttttagtagagatggggtttgtccatgttggtcagactggtctcaaacacctgacctcaggtgatccacccacctccacccctcaaagtgctggcatgacagccatgagccactgtgcccggcccatatgaagaggtttgaatgaggtacaggtgacagaaacctgcacatctcagaacaaagaaaccagagcacgtgccggcgagcttgggcactggcagaggcgtggaggaagctgcttacagagcctgcagcacagcgcaagtaatccatctcagccgggaacacgttccccaggtacagcgaaaaccccgaggtcaccaggaggcagctctgcaagacagcgacagaatcccaggttacaacgcgccccgtccccaggctggaccctgacccttcaacttctgcttcactgtctgtgtattggtgactcacccacgtcccccagcatcaaccacacccgcacctgggacccgcccatcctggactcctcctgtaggacagacgcagccccgccgcagcccaggacatggaccagcctcccccagccatgtcggagcatggaccccccacgctgttatctggaggagagaagaaaggggatctgccaatatttagagcaaggaatggcacctctccccacaaaatactcctgccccaacatgttgtgcgtgcagtcttccagatcccacacccaggtccagacacgagactggaaaacaactgcccatccccctccgtctgcagaacctaatttccagatctggaagaagatccctccaggcaggggctccaggcccaggggctcctgagcagggaagaccctagcaggaggcagggagggtgctctctctcacgcacagcactgcaggggtgcggtggggagggggctctctctcacgcacagcacccccggggtgagtctgaggggagtcagtatcaaaggtcactgggacccagggtcctggcagaggaagcgaggtctggggcagaggggatctggcctgggcgggggaggggctgcgaccaagtccagggcaccaggtggaggagggcagagcccggagatggccaccaccacccgggagccgcctctgtccccagctccgaggcagacgcctgtcttggtggggcatgctcaggccacgggaggtgggcaggaccactgtgggtgctgcaggggctgccggcggaggccagggcacagggaggggagaaatcacagcctggatctcattctcagcccaagctacacggaaccgggggtccctgcatagaggcctgtcctgcagcatggctctgagcagctgcacacactcaggcccaagtggctcctccaatcatctctgtgcccacgactgtgcagggaatggccaggaccccagggaaatccctcggacatctggcgctgcccgtccaccccagacctgttcctttgttccccagctccctcccagccggcccctgaggccctccctaggaggaggaggtccctgaggttctctctgtgagggccgacctgaaggcctgagacgcctcctcccacctttgcaggtgacccctcagaggaccctgggcccccagagccgagggtcatggagactcctggggcccattcatggccctgggactgtccctaccctggtgggactaagccacaacctggagcagctcaaggctggcacaacagacacccataaattaataaaaataattgtgaaaacacaagcaaaacaagctcgtcggcatccaagagttctgcagcagcagggttagtctgagagttgctctctctgtcccacctggggctccagggcgctgcagtccgtcaccagagggaccagatgctcgtggccctccaagggcttagtgtggagctactcacccccatcagcacagagaagacccacgtcttgtggctgaagcaggggggcagtctcttcgacagctgcaggtcgctcggcttcgcgtctggggcatagctggcggggtcttgccggccccgctccagcgtgggcatccggtcataggccagctcctctctgaatggctcctgggtcatggcacttggggacaccacagctgtgctgaatgtacagccacgtgtcaccagttctttatctggaataaaattatcatcggctttggccactctgaggaaacttcaataagttgtttccaagaaatattttttaacaaaagaaatattgttcatactgaagtgctctaaatttgaagaagaaaatgagcacttgaatctaaaagtgaaaaagaaataactttcctagaaaaacggacctgaatagtctgggttcagggtgagattctacactttaaatgcctcattgatccatctgggccctccaggtgcaacacctgacaacatccatcggcaacttcgtccatgaacacatcacgccggggactcaagcacgttaaactgctccaattggtagctaaacgagagattgcaaaacatgcctctactcaacggcttaatgtctgagcacttacctcccccgctgctctgccgttgggagcactggtctctgggtgagggacttccagcaagaagtattcacaaatgaaacaaaagctcagcaaacttgagctgaaggcaggggaaggagagctgcttcctgaatatcaatgaggggaggaatcgggtggatcgtagaaatgtttcgtgttggttgtgtaaaccactgcctcgg

SEQ ID NO: 602 - DNA, 7029 bp, Homo sapiens
ccaccaccggccacctgagtgtccgtgagcgggccgaggcgctcatcaggtccagcctgggctcctccaccagctccaccctgagcttcctcttcggcaagaggagcttttccagcgcgctcgtcatttccggactctctgctgcggaggggggcaataccagtgacacccagtcatccagcagcgtcaacatcgtgatgggcccctcagccagggctgccagccaggccactcgggtaaggggctgggcagggctcaccaggacaggctgggatggtggcacgggctcctggcctgagcgtggcacctgccttgcgttcccacccttctgcctgcagaaccccatccccttctctatggggctcccagagtgacaaaggacagtgattagacacgaagtggcttagctgctcttgaaagcagacaagatacagagcagatatcctgtaaacgataatgcccaggcaggcactgaaaggagtcaccggatacagaggttctgcagaactgtggccatctgccctacaccggggcatgacggagaatgccctccacccattcacacagcaggactcttctcacatgattctggcctgagggagaggaaaggacacctgtcaatgctggagttagagcttcactgcttctcagccaatcgatttgactttaaagctgctgagatggcccactgcttttaggtatttaaatactagacaaggagagttctaaggacttcacccaaataagctgttacttgtccagaatcccaaaccagctgagatgaaatgaatacttgagcttcttcagtgagaaaaaagtaaataaatacccagcagtgctcctatgtgacctggtagacagggaaaatcgatggtgtcaaggcaaaaatgggtcaggtttggagagttcccccactccttttgagtgttcaggttttccttaccatggctcatgctttccatcaagcaccagagttgcagtggcttggcctctggttctgggtgaggttatttgcaggtggagacggggggctgcacctgaacatttctagtgtcaccctccctctccttcatgggaaacagctctccagggaagtaccttcctgccaggggaagccaaggctgggccggccgccctacaaggagccacaggattgcagccatgggtgccacctttcatggaaggggagatttatgggctttcctggaacccccaggctgtcctggccaagaggaaagaggtggttacttcaggagtttgaccttagttagataactaaaagaatacatttcccctcccttttctttatttcctcaataaaaatgtacaaagtatcacccttctccatgccccaatctgtgttaaagtcacaatctatgggtgtagttctgggattctgtcaaattctccttcctgctctccaaaatggacaattgtcgtagggaccacatgcccccagaatacaatggcctctgtgttctactggggtcaagcctgctagaactcagcattcatgacaggggctaagtgtgcatgaagtgacactgactacagctagaaagccaggcgcacaaatgccccttccccccagggccgctctttccagcgcagtcatccagaaaggcccacgtgcagagcccctgtgtctcagatgctgcttcagttgcccgtcctgtcctcagaggccactgtgctggccctctatcatttgacctgactttagaacctgacctcaaggatatggcagcgctagcctttagctcccacagcacggatgggggtgatgccagttagaagtgggtagtgaacgtttgctgagctgttcactgtttctctcttctctttggaagcacctctccgagccatgtgagccccctgatgccaccgagcaggggcagcttcatgaccgatgtctggctgaggctgtggcggacactctcggggttgtctgcaggagagcaagccaggaggacatgggcctggacgacacggcctcgcagcaaagtgtgtcagacgagcagtgacgggcgtgcggccgggcggggaggctggctcccccacacctcccacctgcattgctctccctcgtgctccccaaatcaccacaaccaaccaataccgcgatccatgagggactcctcctgtggaaaaggagagctgttccagaacacagaactgatctcaggtttttgaaaaaaaaaaaaaaaaaaaaaaaaaaatcaaacaacaacaacaaaaaaacctcacatgatggggaaacaaaaaaaagcaacaaagaagccacaccacacctccctggccaggcacagcgctgcccagagcggcacaccgcggacagcaccacacatgttccagaatctgaaatctcaaaagccattcactaacttaaaacaactcaacagagccatgaaacaaatgccctgatgaaaataagacaactgcatgttacatcatcggcactttatacattactgttaccatgaaaaagaaatgaacagcagcacgtctgataccatcagctgggcagatgcattaaggttaaatctaagtgtcaagaaaaccctatttctttataatatttatgcagctgttaagcgtaacatggtggcagcttcacaacaagaaccgtgatcatgcatgcagtcatgtctccagtattctgtgaaaagccaggatacgttaggatgtgagtttagaaactgagtccattcggtgcatggaaatccaccgcggagtcacacaatgctcctcactgtagtccaggcgattggtgggccgccagcaccctgcgggcttcacagggacgcgtgcttgttctccaagccccgcaacccttactgtgcacacaacatcgcacacacctttgtttttgaaattaaaatgtttatagttattgctgcgtccagtgttttgagttatactgaagcttctcatttctacaagtatatcttttatggtgagaacgacatttgggtaaattctgagacaacttttcccatcttcaagaccccaggaacctgtatccttgctggggtagaggtcccaaaatgcagtccatagagtatcactggcctggtgaaccatcccttttcaaaagacaatagttagaaggaaatactcaattttaaacagtcacacaaatttcttcaaagtatttaggatttggaaatttgaggagagggttgggggaagggtattgtagagaatctcttgccccttggaaagtaaatggtaatgcttttctaatttttttttttgtaaactaagaatcagcaattaataaaagcaagtgtactctataatcacagacagaaggttcttattttcaggtcagcactccctagaggtgcaaactttatttaatttaaatgcagttgtttgtctaatgggaagctgatagggccttgctgcagttctctaaggtggccaaattaaacttggctggcagctcctgtaatcctcttgggcaactttacagccaagccccaagggctaaatggcaggcctggagctgtgagtgtggcctccccacggagggtgactccttgagttcagtgaggaaaaccacggtgcctggcagtggtcagccaggagtatgactggccactccttaggcatccagaagtaggaaacacagaaagcattccacaaaacggggaatctccccaaagagctagaaacccaggctggaaggaaatggcagcgcaggcaagagagcaagagcaccctgggtgctcctccatcccgtttctctggggaggttcatgaggtgcttcttcaacagttattctgttcattgcttatcacagttcacgagttctcgtggcatcttttgtggggaggagggaggatgaaagtgacacagtgtatctacaacactaaggtcacattaatcagataggaatgcagtgacgctctgcaccgtctatgagagcgggcatctcgagtgtgcataccgaggcacagatgtgcacacacatccgcaggcaactgcacccacagagaaaaggtggcagtattggagtcaccccaggattcttgggggctgtttgaccagccatcaacagtgcagccatacttctttttcttttttatcgtggtacacaacttttatatttacaactcatgaacttgttaatctggtccttcatctagtcagctatgtatcagaaaggacttcctgcaaaatgttatattctaagcccccatttagaggaggcatccctaaactgacatttcttgctagagttgttcaaatattctgccagtatatagctaaagagttattttccagttcaagagttatttgggggctgggcacggtggctcacgcctgtaatcccagcacttttgtaggctgaggcaggcaaatcatgaggtcaggagttcgagaccagcttggccaacatggtgaaaccccgtctctactaaaaatacaaaaaattagctgggcgtggtggcgggtgcctgtaatcccagctactcaggaggttgaggcaggagaatcgcttgaacccaggaggcggaggttacagtgagccgagatagcaccactgcactccagctcaagcgacagagtgagactctgtctcaaaaaaaaaaaaaaaaaaaagagttatttggacacagatcaaaatggtttctcctctaaagataatattaaaaccatagcacttggttttatataaatcatgtggccaatttggcattattgattctaaattttgcagtgtgttgaaatcatctggcaagtaatttgttaaaatcatgcgatgcttcaacttctttgcccacaaaatgtgcaatgcaatgcctgtttacttagcccacccgtctccagcctcatctaccatgctgttttgtcccaagtcactatgctacacaagcatccgccatcagcacacacacaggtgtgatccacagacacaaccttctatgaatacggtaattggcaggaaaagaagaggagcaggtctgttccacattttccagcccaccagcgttcccacccccttgataactggagggctgggaactgagtgcctgaatttgcagctttactaggatctctccctgtcaaggctgatcatcagagatgacactatccatttaaaagactcacccatctccctgcatgtgcttaccctcactgagaggtaagaagaaacaatttattaaactattacgtgttaagcagctggcggtatgatctgctaaggaggaaaaggaaagaatgatttagtaaatcgtgcttcaaatcagtcctgattcctcccatccgaccttgttattctagctgagattcttcatataagcaatacatgttaattctgtgcttttcaaattgaattcctccctgagactcatatccaaccatctgttagatattttgctttgtttgaataggaggcattccaaactcaggtataagagaatccctgacttcaatctgccctgctgcccccaccccaccatccggcaagagctcctcacctcagccgtggcaccgacagggaggtggcgctcagctctgctcctctcatcctggctgcgtgcagggaggggacggtcacgtggagttctgccacggcacctcttcttcctttaaatctcagcatgacactgttgctacaggctgtgtgcgtttggccctgagttctagttatctgtgaattcatcttatccttcattaaatgtcattgccttacaatacagggattgcatctgacatctccatacatgctccatgatcattctgtttgactaatacaacaatcatttcaggacctcaccacaagagacactaaacgttctttggatttacagcagtttatcactgctaaatgtcaactctgaggtctgggggcacaaaacacactaaaaatgctaaagcctcaagaaggacgcagcagggagtgatgaaagagtgaactttggagccacgcagacgtgggttcaaatctcctttgtcaccgctatcactgtgctcctgaacgaaccacttaaacactccaagcttgtctctttaccgttaaagggaaagtgtgcagaagctcccgcagccccaagtgctaggggccaccctgaatctgttccacacaagtgcatactttcaagtaggcagtgacactcccaccccacataagcacaactggcttcagtgataagcccctcagactagctatttaactttgaaataaccttcaccagctttctttctcatttaagacaaaatcaaagtctacaaaacagacacggctgaaacaccaagctcaaaaggacaagcaccagaaggaacatggcccttggtgtttcagatgcatgaagggcggaaacgcaaaacggcctcccggaggtgccaggaaaggctccatcttgatggggtcccactccagctggggctgaccagctccaccacgcctgggtgcacattgatgacatttccccagcctgcctccctatctcttggttctcctgagggctgtggtactttcagatttacggccaggatcaggttcccaggcctttgtgggaagcctctacccaactcagaggccgtgcctctcctggcccactgaggcatgcagcccacaccggtgtcctggtgatggtggctggaagtcacagccagcctgccagacatcctgagctcggaactcagtctccctgaacagccccgccaggcagggactgtggaaggagatgcccacttcctcctcctgggcaggtagcccttttgagggcttagttcataatctattaggcctccctgttgtggtccctccaaggctaggcaagtccaagtcaagcttcacaaagttacctcggaagaaaagcgctgaggaaagagacactgatggaggaaccagacctgggctgcgtgccattttggttttgatgtgagcccctcccgccccattcactgtgccccagtgcccagcccagggctcctcacccgccacatgcccgacttgtccacagttagagagaaggcacactgctgcttataccagtgggtttgtagccaat

SEQ ID NO: 603 - DNA, 28215 bp, Homo sapiens
tcctgtctgtaaccatcagatttatttttatatttattaagcagtaagcaaacagagttgggggagatgacctaaaatggttttcttttggaataatattttttaaaaaatcaaataactgttatcactttaagttgcatgaggctgaagctgcacctggagaggaatttaattttcatgacatgcaaaactgattaggcagtgaactctttcctcccgcttcccctgaacacatttataaacttcaacgggggtgaattccatctaatactctgaaaaccatttctcatctcacagtttacccaaatcatgtgcatgactgcaagaggaaataaacaagaaatctttaagcatagataagccacaatggatagttaatcttgtacagacaatccagcattaaggctaatttgatcttttaaacattttatgggaaacagctgttgagttttctctagaaaagcccacaaggttccataaccccataggcatacagcctcgacaggcagggctccatcaggctcctcttgaactgggcactccttcacggaaggcaggaatgcacgtgtcttcacttcctgctgctctgcacgcacgtcacgatatctggcagaaggtggtttctgttttccttggtgacctgtgggaagaagtgagagaacaggcttcagagctcctttcctcttcttcaatcttgtgctaggtaactctctaaaagaaacgcctggaaggctgggagagggtgaggtatgttttgttacccaggcaggaggcccagctcttcaggagcactcagaaacaggacaggaatcaccgagtcccagcatcagtttctgccaagtgacagctcaaaaagtcaaagtgggtttggagcccagacagatttcagccaaccatggggagagctgtgaagtgagtccgacgaggcacaccgggacggatgatgggcacacaggacccctgagcacgacctgtcctgaatggaaggaactcaactgttggagtgaagcgaggaggagagcctgggagccagcggggcccaggagggcacccagcagagcagcagtgaagcgcccaggattctgggatgctcagtcatctacccgcctctccacaaacatcaagtgctcatttgaaacatggagaagtgggagagccagagacgtgagggtgcctccgtacagactgttactcaggcctcctgactgcagtgtgttctccaacacttacaccattacaaaatcaaacaaaagcaacaaagagttcaccagagctttacccgatgatctgtttatttttctttcactaccacaccatcccgagtgccccagggtaaaggaagggccatctctgctcccatcacagtgccttcctacttggcccatataatatccatccactcaacacacgctgatggggtggaagggcaaacaggagccaggcacagagatgcgcatagagaagcaccacaggtaaggaccctgacctcatggagctcgcagaccaggacaggacaggcatgaacaaggacaatgaaggagtctggggggcaggcaggaacaggggcatgtgtggggtcaggggcaggaaaggcttccaggggtgcttaagcctggatgtaatttcgacaggtgaaccatggaaaaggggctgagccaaggttcccggtaagagcagggagtgcatgtggaagccttctgaggttcagggtggttgtatctgaagagggggcctggcatacaataggtgccaatacatgtctgaagaggagatgcagagcggacctcgtcaattctggttcctggcacctgctcacccttcttggaagagtgctctggttgtctttaggagactgtacggtctaggaaacttgcccccagccaacaagtgggcaagccaggccctggcaacttctctgagatctgtaccccaagaggagtgactgagatctgcaccccaagaggagtgagctcacgcagcaagtgccagaagctgatcccatttctactggtcctggctgcgtcaatcccgtgatcccatttctactggtcctggctgcgtcagtcccgtgatcccatttctaccggtcctggctgcgtcaatcctgtgatcccatttctactggtcctggctgcgtcaatcctgggcggctgtggctccacttgaaatgaggacagtcagcttttcctttggcttcatgggacagctccaaagcctataaggctttttgatgctgttttcacttaagttagccaaagtccattcctgttgtttgcattcaaggaatccacctgaggtagaaaggaggcgacacagaggtgggcaccacaggggcccttttcttccactctgagttcagcagtgattgcagtagcttctgcctccagccaggctctgtgagagtggactgtgatacacagctggagaatttgctctggtcttctatgacacagtacggtgactacagagtaaataacaaggtagtgtatatttcaagatagctagaagagaagattttgaatgtcatcaccacaaaaatgataatttaaagtgacagatatggaaattaccctgatttgatcattatacaatgtatacatgcactgaaacatcacactgtaccccataaatatgtacattatatcaattacaaattaaaaattaatttgaaaattgagcagaatgcaaacactccaatattaatattttgatactccctttgatttccctaagattatttctgaaaattatgcaataaaatgttgatgtgcaactctctgcagtattcacttatgatattccctgttgagaaaagcacactcccaaatgcaagaacaaggatcacagcatctgccaacctcaggagtctttgccttatgtgaaattctagtctactttttattcaacagccagaattttggttgcagaaagcctttcctgagaagctaattagaagagggaactgggagctgggagcaggaaaaggaaataaagaagactgcagaaagaagaaagtaatcccaaccattctttttttctgcactggagccttaagagaaagaaaggaagctgagtgaacctgaacccttgcacctgcccagtggctgtaggggggcccttggtaagaatttatcctgggcacagtgaagataagactgtgagcaccatggggtcagaggccacatctcattcatcctgtgacctccagatccaatcccttgcttattaggaatgttgggggcccttcccacagtttcaaggaaatgcatgtggttttgttttgctttcttgcacatagttgtatactaagaggcatttcttcccctgcctgctccatccatgttttcaggtctggggttgttaaagtcagaacataagcaggacccagtatctggtactgcatctgtgcccagcagatgagtcaagtactgtctctcgccgtacctaggccaaccagatgagaagacaaatttgtgatatcaccacctcaacttcttatttaaacaatcaagaagcgggaaggggagactgagcagggcatacagacactgatcatattaaacaagttagaaggcagtgaggtagcatgcaagcagcctggaagatcagataatatccactcactgctgccaagaacatgtgcaccccaaggtctaaacaagaggcttagtcatactatgaagctgccagcttgaaaaagaactaaagttgttgataacattttcaatgttatgacattaactagaaggcagcaaaatcaatcaatgacacactcattgggatacaatgggataaaactcaatgggatacaatggtaataacctcttagagttctgaaaaacaaattattgaagaacccataagtcacctgctatgatttgactgtgtcccccacatttcatgtgttggaaacttaacccccatgcaaatagaggtgggacctttaagaggtgattaggtcatgggggcagccctcatgaatggattaatgccattatagtgggagggagtgagttatggcaggactgggttactgataaaatgatgtctggttctccctctctattgttcactgctaaaactccagtggatagaacagtacctgacatacagtgcgtgctcaatatttaccaaatagatgaataaaaatactccatcaccaatttcttctactgatgctttactaggtaataggaggtgccaaagattgtatcagtgagattttattttccttctcaggtactgttctttcttttcttttttcagctattttttttaacacatcagagaatgttatcgttttgcctcaactgtcaaacataattcttcaaaagtcaacagaggaagaaaagcccactacactcactcagagttttactcttcccattgttctttcttccttcctgatgttccaggtctccttttaccatttcctttctgataagagaacttcctttggccattcttttagagcagttctattatgacaaattctcttagttttccttcatctgtgaatgtcttatagaattatgagtcgacagttgtttcaacacttggaaaatgtaccacctccttctggccttcatggtttctcctgagaaatctgctgtcactcatattgtttttaccctataggtaaggtgctgctttcctttcactgctttcaagactttaattttcataagtttgactatggtatgtcttggcatgaatttgagtttatcctcttggggttcactgaaaatgtaggtttatgtcttttgccaaatatgacaaaaatgcagccattacttcttcaaacactttttcaaccccacactcatctcctgttactacaatgatgtgaatgtcacatcttttgttatagtcccacaggtcccagaaactctgttcattttgttcattactttttcttttaagtctgctctttgtcaggtaatttctattgttctaccttcaagttcactgattctttctcctgtcatctctattctgctgatgagcccattcagtgacttttttattggctattgtatagttctaaaattttcatttgattcttctatcttctaggtttttgctgaaactttccagttcttgctgagactatttttcatttgtttcatgtgtatctgtaattttatgaagcatttttatgatagctgttttcaaatccttgccctataattccactatctgagtcaccttgctgttgagatctgctgatggcctttcctcactcaggtttaggtattcctgattcttggcatgacaaatgattttcagttgtgtctgttgtgttgttccttaggtccttaggttcctagccagtctgtctttttctcttcacttttcaggtcttcttatgcttgtattataaataacatccttagcaggaaaaataaacacaagtgtgtctactctatcttgtctaaaactggaagagttctcgggtgtttttggaaagtactctgttcacccaacgttatgaagaataagtcaagataatattactaatttgtgtggtatatttcccccatatcatgagctcagtctcatcttcacactatgcatattcattggaaagtactctgttcacccaacattgtgaagaataagtctagataatattactaattcgtgtggtacatttcccccatatcacgggctcagtctcatcttcacactacgcatgttcagctggtagcaaggggacgctgactctgaccccttttcatagctcattttcttacctggaatgttctcccttctttttcccatttcctccttcaagagccaactcaagaaccccttcctttggacacctctccactaccactgctcacatagatctctcccttccctgcccctagattttgattgccccatggtctgtttttcttgagggcagagatcatgcctcacaggtgcctaaacgatggactaagtactgaatgtgaagggcactctcaaaaatggattcggatactttattgcatgtgagcaatggaaagaacccaaaaatatatctaatccaacacctaagtttgcagataaagaaaatgaggttcttggccaggcacagtggctcatgcctataattccaacactttgagaggctgaggcaggcagattgtttcagctcttcaattcgagatcaaccccgggcaacatggtgaaaccccatctctacaaaaaatgcacaaatgagtcaggtgtggtggcacatgcctgtagtcccagctttttgggaggctgaggtggaggatggcttcagcctaggaggcagaggatgcagtgagccaagagcatgccactgcactccagcatgggccacagagactaaccttgtctcagaaaaaaagaaaatgaggttcttgatttataaaactggaaaaggccaggcacagtggctcacacctgtaatcccagcacagattactctgggcaacagagcaagactctgtccctccccctcaaaaaaataagttaaataaaaaataaaataaaactgaaacagaaggaccacacaaaccccaaagcaacaacaacaaaaaaaaacagggtatgtcagcccctatctcttacttaattaactcaaagctaattgttttatttacagatcattagaagcaatgattatcttgcctggagaataattttgagtctcagagagcggaagaaatgtggtatgatcctaagacacaaagtctgtttctgggcatcacagtcagctcctttcaatccttccttaggactgttagattagattagtttgtggaactagccaatccctggagtctaacactagcaatttcccggtcttccagcctagaagctatctgacctcaaaactaattttctttcatgatctttcactattcattgccttgatttccatggaaactctataatcacaaccaaaaatgtaaaataagagaagacgacatgaaactctgaagaaccccacagacttttcagggctctcaaatgtcacctccttgaagagaccttccctgatcgcccttgctactcctgcccccaactaccacattgcctggtttctttatttttgcctttatcagtatctgaaattgcttaacttatctgttcacatttttggtattcagctcctccattagaatgtaagctccatgaaagcagcgccttggtcagtctcgttcaccacagtatcccaagacttagaatgacacctagcatacagtaggtgctcaatcactattgaccaaatgaaggaataaataaatcaataaagaagcgcatacatttttccaagtctggctggtctaaccctaatggctgtttaccaccacactccaggattcttggtggcaacatgtggatactccaggattctttggtggcaacatgtggatactgccagtgggccaaggtgacatttcactcagtgattaaaatgatcatgaggaaggtgctcacgggtactcactctccactccccctgataggagtggccctgcctgcctgacttgttcacttggcacttgcagggccagggagcttttaaactgggggtggggagtgaggtgtgtgagcagagctcagccaagagcacagctaccactgactcaaagaaactaagggtaggggttggggagaagcaatatctgactgagaggaaaacagagggacaacagggaaagaaaggcaagaatttagacaaagtgccagcaatgccatgagtcccttccgactggctcagacgctgccactggtcaacaagccctagcccctcatctctcacatgtggtctacagcagtgcttctcaaagtgcgggggacctaaaaaccacatgagaacttgccagaacagatcatggggccatcccccagagtttgactccttggaccagggcaaggcccactcccaggtgatgcccatgctgccattctgcaagcctcacactgagtggcacatcctacagatgcactagtgaatgtagcagccacacgagaccacagagcacctcagatgtggccagtgtgactgagaatccaaatgtttaattcaatttaaatttgattatttatgtgattaaataaataattcaatttaaatatgattaaatttattaaacataaatagcgagatgtggctagtcgctactgttctgagcaatgcagagagcacatttccctcactactgggaagttcaactggacggtgctgctcttcagcacctggaagctgtgtctcccaacacatccacagcctcttctccccacaagcacaagtgggtcagctttaaaagggaaatctttaaaacaaaacaaaaaatatttgcctctgtatcccaacctggcgcctttcaatctgagaagagataagcttagaacaagcaccttagctcaggcaattctgatgccagagaggtcctagtgtctggtgaggagatggaagaaaaaagcagccagaacaactgggaccgtcaggaggcccccccataagcgagtttgttttttcatcaagtagaggtataatttaagttctatacatttctagaaaattagactcacctacatttcagcatggaagggaaaaaatgttaactcaaaaccaaagagatattttagagccatctgctattttagatcatctgctccatttccactgattatggaggactggctgtactcacattaaacaccttcacatcctttctgtttctgatttcttctacaagagccagtggctttcctttaggaactgggattgtgccaaggattatagtccctggggtagacagcgtctgacgaacagcttgaatgaaaagctgactgaagagctccatcttcccaatctcatcgatgacgcacactctttgccctgggccactgctgcagtcggcctgagaatgacaaagactttcactgggacatcagagtcacattaatcaaagggcccatgggtcccactccccaatcactcaccaatgaggtaaaaaagacagaaacctttttactggatttcaaaaagtgacagcatcccacagaccaccgctggtactgtgtgggaggggactgcacaagggtgagtcccaggagctgggaatcattaggactcttggaagctggcagctatgcctgtcaccagtgggatgttcaaggaagtaacggacataaattggaataaagtcatgagaaagagaatctgagatctaaaggatgcaattgtacttacttttttttcccctttagccaagacttgtttccttttaattttcacttttttccaacaacgcttatggaccagatcatgaaatacacaaacatctacctagagcagttatctcccccccagcacgtagggaatctcatatggctcaaaatggaaaaaagaggccattattatcaacaaaggctcccatgcttgctgtctcactttttttaagcctgaggtatttgggtgccacttattttctggttgtatataaatataaagcttgatctctgtcttggatcccctctctcgaatcactcactctgggggaagagaagtgctatgctgtgaggatactcaggcagctgacggtgaggtccacgtggtgaggcactgaggcctcatgccaacagccaagaggaaatgaacctgccagcaaccacatgagcaagcttagaggcagggccctcccaggcaagcctcagatgaccacagccccagccaacagcttgactgcaacctcagaaccccagctaagctgtacctggattcctgatcctcagatactgtgtacaataatgtgtttgttgttttaagctgctaaattttgagataacttgttccatagcaacatataactaacacacatgtcctctatagaaagccttcctggggaaggctgacaggactttggttgattcttccctgggagggacaaaacagaacatgtaataaacacttcaatgaatggtgaatgacaaatacaccttatatatgtttgtatacatgattattttgaaaactgtatgtaaagctgatttacaaagtattcttcactacagttctgattccttaaatgatgacagcaatatagtcctagagggcatgtctgagttaagctagattttgttcaaattccaaaagccaaagcagcatatggtacagtgtggctggtggtagggatcagtggcaaccaggggcagccagtgacagacggggctgcgggcccagatcctaaaggccttcgaaggcacacacagaggtgggaatcttctcccacagccgaaagagtctaatccagggaggatcacaagttgtgctagaaagactgctggctgtggagtcagaaacaaatgttagactccttttggaatagacaagataagatagtgggtgtctaaaccccagttgtgattgcacggaagcagtacagcagtgtttttcagacttttaagtaaacagtactctattttcctactgcatattgtacacttatgaaatatttttccattcattttattagctaaaagatcaataaggagtccactgtaatcacccaagagaggtctgaacaatctccgcacttctgtgtttctgacatgcttcatttttgcctctctattaagtttatctgtacacacgcctggtctccccacttagggcaggtacatggttgtcctcgtccgcatccttcctggggaactcaccgatgtcccagagctgagaagtggggagctgaaggagcaatgtcaccctccactggtggggtcggggagaagggcagagcatctatgaagtaagtcactacttattccaagtttttcctccaaaacgaaagccatatttgggagaaataaaacagctatcaaccacctgtctatgataataaaaacagacaactgtacaagaaggtttctgtcttcctgggggcatgccactccaactgacccgactgttcccaagtgctgtggacattttgctgcccccagagacgaagagtaattgtggatgccattcctctggaggctgtcatctaaaagccaaaataaaacttattctggcacctcaaaatgagttttggaaggtgccaaatcagacaagaagtgatatgaaagaatgtgtgtacacatgcacatgtatttatttgactatatacatgagggtagtaaaatgcacgtggccatgtgtaaatacacacgtacaggtagaaagtgtgtggctcttcaacaaccagccttcctgcaatcctctagaacattcaccagtgaaagctcatcaacatttatttaagtttcagcacaaaagaatttggacacacatgtatacattactttctaccaattggaaatcctcattttaaaaccttagcttacataaaatcctcaatctgtccagaattggggaattttataatccaagaacttcaggaatctcaaaaataaatctgtgatttttaattaaaaatgcaagttattcatattcagttgagagaaagatgtcagctgctgagccactctgaagcatgtagacactcagcctgcttttctaaatagtacaagatcatacactcaaggtcttaaaaaaagaaccactataacgtgtaacatggttttatttctatataaattcaagcaactttagagggaaacaaagaaataagtaagtaaacaaacattcaccccctttacattgttctaaattgatagagacacagacttagaacaataggggcccaggtttgaagatggtcaggaacccctccccaacccccagtgtgaggagagtcctaatgagctcccagagaaactccacctacagctgctggagtaaggagtgtgtaaaaactgtaggtggctctcagccacgtggtcagaatcacgatgtacacaccatctggggtgtacacaccaactggggagcaccctttcctcccctcacagcctctcctcagagaacaacccaggcagcattgcttcctagtgccacacctcagtcctatgtaacacactagccttcctggccacacccctcacaggcttccacttcagctgattataaatgttcagccatgaagcgcacttttagtttccctgttccgggagagaagatatttccttagatagagtcctaaaattgaccagccagggataagagaagctacgaataattttataactttggttacactcacctagtttgctttccagaaagattagaacaacaaatatcttcgtaccagttatatcagagacctgaaaatagtgtgatttttttgggtcctttatttttatatgtacttttaaaaatacaaagaacatataaatataaaataatttcatttaaccaaaatatcaaactgagagcaagctaatccaagtggtctttgccttattctgaattatttgcataataaatgtttccagtggtattaatgttaattttaggaggactgtttggattgttttattttaatatcagacacacagactagctcctgagcttacccacctgggacagcaagtatggaaagtcatgaaagtgaataaggagtgtctctcagaagttaggcagcaaaactgcagcccttcgccaaacagcagcaagttctagggaagcagaaaggcaaatggtgctaacagcagccatctctgagccagcccacaattcctcacccactgaagttattagctaaaaatgcagggctccggtcatattttatgtgtgtttattccaagccttcaagtctcataatccctttgctgtctggtggcatatggactgtgagtctccagggcatagccaggacaaggtgtctagactgcccgatggcgcctggtaacccggcccttccccagtcaagaatactccgggcagaagctgctcccccggacatgccagagatcctcaccccggcacacagacagactagctctgaggctcttcctggatgtcctaaatggcctctcgggactcacaggggctcacccacatggtcacccgactgaagagcgcttgaatggtagccatggggttttccaagctatcttgggactgaaacaacacctcctggctgacagtcagtccagtgagacggagagcccagtactcctcgtcctcctcatgctctgagcacttgggactggcctgcacatttgggctcctgggactccatgacagattactatcccactccggaccccagctccctggcaaacacaaaccaaattgtgaagggaggctcctctcaaggtactgccatccaccacctcaattaacttctcaagaaaataatcactgctattgctctgctgagcacctcctaggagccaggggccaaggcactttacaagcattacattcagtcctcccagcaacttcacatagcaggtaacagcatctgtttcacagatgaggaaaggaaattaggcattaagggatttactcaaaactcactgagagcacagtgacagagctggagtcaaaccagagatcacctgacttcaaagctctcttccacaccctgtgtgcaatacgcctccacactttgattctgaaataaagaatagcatctaggaaactgacctaaccacgaagaaactgctttcctctccaataagaacgaatagcactctggtgtttagggatctatggaggcataggcacaaaacctcaatttatttggagtaatcatattgctctaaattactcgaaaataactcatattttgggtctgagaataatatcaccaaaattatttcatcaagtatggatagcgaatggcccactgcagtaggcagatatgataaagtaaaaggacttctctcctctaccaggagcacaccccgagaagacggtggaagagttatgaccaggtatcctgatatgtccaccttcctgccagtgtttacaaaaaccaaattaaaaaaaatttcacttgcttagtaaaaattttcatcaatatttaagcttttggtaaatgtttagtatctctgatacctgataccgttttcattagaaactgcctgaggagaaagaactgattgtttttcctataataaaatggtgatggcttttctaatggggaggtaaccggatacaaatagagagaagcacagcttagagtggaaaaaagcttaaccattatggcattttttttagtgcagcttcaatgtatagtaattttatgtttgttaattactgctcaccttgctagagaaacaatttcaaaagagagtagttaaatctgcttgccaattaaggcctcaagagaaaattatttttatcttaagatgatctaataaagtttagataaaattagaattggctaggggaaatctgatgaggaggatgtgcatggtctcacactatctccccactcactgctcattagtgtcaaagaaaaaaatagtaactatacagtggagaaataggacaagtccttgatcaggtaatcaaaattaatatcactaaacatcacacacctccagatgagatactcgagaaggatgcatcatcacttatgacttatggagtattccagctttatttggtcatgaggaaacatcagaaaaactccaaaagatgaacgttcttttaaattggaactatattctttacaaatgtcaatgtcctggaagacaaagaatgactgtggaaatgttccaaattaacggaggctatggagatgtgacaactaagtgtaacatctggaggaaaagaaatgttacaaagaatattgtcaactgatgaaactagaacactaacgatagattaaagtattttttcaatgtaagatttacagaggttgataactgtattgattatgtaaaagcatatccttatttttaggaaaaatatactgaacatttaggagtaaagtaccttgatgattgcaacgtattctcaaatagtcacccccttccagcttatatatttatacacacacacaaacacacacacacacacacacacacacacacacagagagagagaataagcaaacaaggcaaatgataaacataggtgactctggataatgagagtatacaggtgttcttgcactattcttacacttataactttctctaagagtaaaattttatccaaatgaagttaaaaaaattgtcaaaaaaagaaaacacacacgtatgtactttctcagtaccagactcaagaaaacaaccaactcaccccgtatgaacttcctcctaatggagtgtggttttagactgatacgcacgggaggcgagacagaaggaaatgctggaaatgggacaaagtgagagggaaaaagaaaaacggcaacagtttatacaaactcaaccccagtccagcttaagggacgtgtgacttaaggagcatgcaacttttctgtgtttcttgagagtggactgcaagaagaaagacatgaaggtgtcataacccagggcaaaagcctgcttagcatctaaatccacagaatctcgccaacaatcagaaataataaagtctcagtctctgctcaatagaaattatgaagatttgccatgacaaatcttgcaaaatgaactgcagagtcaacctcatgctgaattttcacctcattttcttatgctgattcactgcaggaatgtccttactgacagtttaaaaactgattttctgtttgcgccagatagcttttaatttccctggctgatcctgcattacatacttgtaatacatgaggtagagaaacagaagctgagagagaacaaagaatcaaatgccacatttgctaacagcaatgacagaaattctagcaatgctgaggagcttgtcaatctttcaagaatggatcctgactagaacttggtttttctacattctttctaaagccaagtggcctgagagtgacctaaggaacacttccaggtcgagtctaaaaaaacaaaaacaaaatacttttccctagacaggagtcctctcaccttcaaaggaagtttctaagattttccaaagcagagcctatttcagaaccaaaagtagatcctgctctcaaaaacaaatatactttaaagacttattttaatcaaaacaggaaaatacaaggttcaaactatgttggttttccctgggtgttctgattttagcttactcttcctttcacagatctttgtaaaaaatgacactgttcacctggaaaacagggctttgagtagatgtcctttgttctttaaaacattataatctattgtctccattttgtgtgagtaggagatatgttgaaaatcaataaaatgttacatcttacattgcatcaaattttaataaagcattgagggtagctatcaaaaaggccattatgaaaaaggccagcattatcttatcagccttgatcattagaaaacagaaaaaacaatcctaattccagtagcaccagaaaataggagagccctatgaataacctcaccaataaaaattttaaagaaacagatggagaaagagaaacatgttttgggctgtggagaattaagattatctgaaaaattaagacaccctttatgtcaaaataactatagtcccaatcactccatataagacattttttttaatggatagtaaagtcttgattctatagttcactccagctctaccacttacacaattagtgtgtccctgggcaagtaactttccattctatgcctcagtttcctcatctgtaaaataggaatagagtgatagtgttctgaggattaagtgagttcatgcctggcacgtagttcgcactcaataatagtttactattacaagtgccaccattactacagtttctgaacaaggccattttttgaagaagaaaaataaaaacgattaccatggtaattaaaatactatggtactgatgcaaggatcaaacagatcaatggaagagaacagataactctgaaacactatacatacaagcacacatagttttaatataattaattaagcataaaaaactaattagaaatgggttatttaacaaacagttttagtaaactggctaaatatctggaagaaaatcagctgagaatctcatagcatattacactcaacataatccaaatgaattgaaaacataaatgtttaaaaaaagcatgcagaagaagaaatatataggtaaaattttatataaatttggaatagggacagacttttctctaccttgaagggaaaataatcaccaaagtgaagtgctaaactgagaaaaacagaatcaataatataaaaaggctatctgctttataaaacatctatttaagcccaaagaaaataaatgggaagagcaatggatgaacaactaaaattaaggaaaacttaatgaacaactgaaaaacatttaaccccattagtaactgaaaaatgcaaatcaaaacaaagcagtgtgttgaaaataagtagagtgctcagggctggcacagcgcagcaagacaagcacactcacaccctggcagtgggacacaaagtcaacgcagcaccatcaagaccttgaaggttcacaccccaccatctcagacttcaccttttagaccctccccagggaaacaatcatggctagagaaaaagattcatgtataaagggtgctttgttgcaaggttacttacaatggtgatacggaacctgaatgctcaacactgagggagtaatagttaaatcaaagatgaaaactcataccatgaaataggatgaaaccactaaaatctcccagctttgaagattagcatgttgtgagaccattcccatgtccctcaatcatattaagggaaacacaccaagcctatgaaactatacataacattttccctgatcctgaatgactgaataaataaaccaggtatacaaaaggggcagaaacaaaataagctaacattggctaacttagtgataagattatgagttattcacattgtgttttttatttttattttacattttttataatttttttaaccatgaatatctagaacttgaatactcaggaaaataacaaatgttgacaaataaggaaagagttaactcatggaatgaaaaaaattaacagtcaaccctactagaggctttccaaaaaccttcctgagtctagaacacttaccacacacactctatttttctttatttctcacgagcgaccacgatgctcaggctccattcctgcctaaagaaacgtaaccaggctaggcacagtggttcacgcctgtaatcccagcactttgggaggccaaggtgggtggatcacgaggtcaggagttcgagaccagcctgaccatgatggtgaaaccccgtctctactaaaaatacaaaaattagccaggtgcggtggcaggcacctgtaatcccagctactcgggaggctgaggcacaagaatcgcttgaaccctggaggtggaagttgcagtgagctgagatggcgccactgcactctagcctggctgacagagcaagactctgtctcaaaaaaaaaaaaggaaaagaaaaagaaacaagaaacataaccagagcagttttgcaaggtgaacctgggttgtgcctggccctcctgagcctctcctggagctgctcttcagctcccggccactttttttttttttttttttttttttgagatggagtcttgctctgtcacccaggctggaatgcaatggtgccatcttagctcactgccacctctgcttcctgggttcaagcgattctcctgcttcagcctcctgagtacctgggacacgggcatgtgccaccatacccagctgatttttgtttttgtttttagtagatactgggtttcaccatattggccagcctggtctcaaactcctggcctgaagttatccactcacctcagactcccaaagagctggggttacagacatgagccgctgcaaccagtcccagccacatccttacttccccacctgcaaataggcatagccctgcttggcctaattagagaagtacttttttcttatttttttgtagtattaaaacacacacacacacatacatacaaccctcaaactatctttcactcatacatattgaaatttcttacacacaatggatatttcttattatcggaatttgtgttttcatagatcccagcactatgaactaatactgtgtccctttataaagggtttctaacacttccagtttacttggttgttttcattgccagtatcaaaaatggtgtgtttatactccccagttttgttgcctaattattttaattaatattcttttcatttttttctttagtataaagacaaaacactagttccttctcctttcttcattcccataaaatatgtatgatgggagaaaaatttctgctccagaaaagaaatccatgaccctgactgggtgagaatcctatattagtccattttcacactgctataactacctgagactggataatttataaacaaaagaggtgtaattgactcacagttccgcattgttggggaggcctcaggaaacttacaatcatggtggaaggcagaagggaagcaaggatattcttcacgtggcggcgggagagagagagtgcaggggaaactgccacttttgaaaccactggatctcatgagaactccctcactatcgggagaacagcatgggggaaaccacccccatgatccaatcacctcccttcaggtctctccctccacacatggggattacaattcaagatgagatttgggtggggacacagagccaaatcatatcaaatcccctgccaggaactttttctacatggaatgtacatgtctgcatttggcaatcagaatacaaaatgttgggagaagtctgtatttctttattttttaattaaaaaacagatttatgctctgatctggtcagcatatgatctcttatataatcttgcatctagacactaaacacctgtgcaaactctcctcccaggatttggtctactctgtctgagcagggtaagtaaaaaattctttgtattgacccagtcagttcctaaaaccagaatcttcacttggaatttcatttgaagtatttcacttgacttttgaacatttaagtagagaggaatgtatgtgacgggaaaacagctaaaaagaaaagtaccatgttctctgctcccgcaaaacacagtggccacgagagtccccagcacaggaactgagggtaagttccaagaggaaggaattggggaagaaggaggtgggaggaggaaacacagcgtaggaagaaaaggagaacttggtgggttccaagaagcacaaccccctgctgaaacagaccataagataccaccagccctctgagattagaggatatcctcagaggctatagctaaaatcttcagcagcctttgggcaaccaccactacatacttcagctgagctctgaatgtcaaggagcagagaggcaaagatctatgaagacagcgtgctcaccaaaaaaaatggcaagtgccaagggcctcagcctggcatatgtgggaagtctgattgaaccagtgtggctgaagaatggcaagatgaggtcagaggttagtaaggccagatatcacagggctacagggccttctaggccactggaaggactttggactttattcttggtgccatagaaaactctggatagtttatagttggtttttgagacaggtctgtatcatttaattttcacaaatcaaagtagtaagtctgtaatagattaaatgacactcacattccttaacatggtccacagagccctgcatctcatggccccccacctcaccaaacttaccttcttcacctgctcctgctccagggctctgaggtctgaatgtatctgttcctgccatttagaatattctccccagacctccccaccctgacacatacaaataccccaatactaactctctctccccaatgccctctcacctgttcctttctgtttaaatgtcatcttcccagaactctttcctggtcccttggtctaaagtcagttcttcctgtccctccctttcatagcaccctgttcttttctttcacagcattaatgaccatgacaagtataaatttacttagtgtctacctttcccactagactaacagttttgaaagagtagaaacatgtctgttttgttcatgactgtatatgcagtacttgataaatatctgataaatagatacataaaactacataatcaataaaacaaaagctggttctttgaaaagatcatctaaattgacaaacttttagactgaccaaggaaaaaagagaagatttaaataactaaaataaagaaagaagtgacaatatcaccaatcttacaaaataaaaagcattatgggtgaatctatgaacaactatatgccaataacttagatacttcagatgaaatggacaaattactaaaaggtacaaattaccacaactgattcaacaaaaaaatacaaaatcaacagacctataaggagagatttaattggtaatttaaaagcttctcaccaagaaaaacctagcccacatggcttctctagtgaattctatcaattattcaaagaaaaattaatacgaatcattcacaaactcttccaaaaattagaaaagaaggaaacacttcctaactctattagaccagtattaacctgataccaaaactaaacaacaatatcccaagaaaagaaagctacagaccatatcttttgtgaataaagatgcagaaatcctcaacaaaatacgcctgagtaaactctatacaaataagacacagttaacatcatacataatggtgaaagactaaatactttctttctaagattaggaataagataaggatgtctactctcaccacttttattcaatgttggactggaggttctagccagggtaattaggcaagcaaatgaaataaaaggcattcaaagtagaaagaaagaagccgtaagatgtcaataaagtttttttcttttttaaaaaaggtaatataataatataatacgttaactgcttacagtacttggtaggcattcaataacaactggctattatgttcatataatgacattttctcttcctaaatgtttgttgtgctgtgaaaccaggttaagacatgactgtgagaagacagaggaaagacttatctttgggaatgttggtacctgggcatcaagagcctttccaaaataaaatatttatatgtactgaatttataggaatttatctgtagctcagagtgatagcaaattatgttgtttatccttattaagactcaatcttttcaattgtaaaatgcaaaactggggcctttaagagcaaaaggcattctgtttccatggctagcaattcccacaatacactaagagcagatgggttcaaaaagcagaaatcacgtactcacattcctcaagacgggtagtgccaactgctcaaaagaagtcaggtcgaccacatactgcccaactcggcattcacgttttccaggtggaggctctaacctgaaggaaaagacattatgttctttgttgaaaaactcctgtattgatttctggtttttagctgctccactgagcctctggcattccacatatgctaaatcatccttaaaaatgaccaacacaaaatgcggtggtctgtaaagctgatcaggttttctctgctttgaacagagctaccctgttcaaagtgtccacacctccaacaatgggccttgcagttatggcagggctatctcttaaggtccaagcagctactgcatcaacagtctttgaaaagtggcaccagaaacaggactaagaattataaagtgagaggagtttatgacttggtgaacaagttttaagtaaaatatcactttcttatacttttttcatgtgatggtttcattctgttttctttctctgagaaatccctaaaggcctaagattcttgaggatagatgacaacatttggctcaaccctgtgcccagggagacactctcaacctaaagggaaagcagatgggcatccaaggacccaacagagtatctgcttttggtgaatttagctcttgttgaaaagctcccaaagcacagatggaaggggagcttagataatagaacaccacagaaatgaaatatcagtacccaactctcgataaaggcccccgggtgccggacaacgtgacgacatcgaatcctattcttctccctccctgtctgacttcttcggtataaaatccatcaacaggcacaccagaggattttaaaacctcactggctttatggatcaatgttgtttttccaactcctaaaataaaaaaaaaaaaaaaaaaagaagaaaagcccattaggaaacattcccttactagagcacacacagcacttgtggactctgaggcagcaattatggtgggtagagaaatgggctgtaaatggatttatgaatatgaacttcaatttaattttgattgctccaggtgctaaaaatgcttaatttcaagtagaaacaagcataataaaaacacgaatgatatcttgaggtttatttttaaattgtgaaacattgttaattttgtcacgtacacaatcccagaatcaactgagaggttcctgatgatattctcccatgccatttgcatcctgtgaaatggtttacagttcccatttttctgcccaggaagtaacactggtcacacttgagtcaggggctgggaatttaagatttcagctttcaagagattacaaacggacctacacttaacagtgggaaaatcactttgttcctcctttgacttacattgttgtaactcctgaaaatgtgtctcttaaatatcattagcatccctgttaatggtcactttcaaactttttcataacagcaagcctatcaggttagcaactccttccaacatcatcttctccagggtctctaagcatttcttcacctttatcccccacaccttccccagtttgaacctatgtacctctgccccctcagcctccccaccttgatccttcctgtccatccagcctggtcagctgactactctgatgaactcactggtttgtaagcaccaacaggtgctacctaatatagtaatactcatcactgacgtcatggagccagacactgttctagcacactttggaagcattttcttggttaagtcctcacaaccatcctctgaggcaattaccatccttatgcatattttacagatggagaaactgaggtacatggtggttaggtattttacccaaggctatacccctcataaggtccatacctttcaacaggggactttacctgtcaccatgactttttaaaatatgagccttgttcccaatatggatttaagtaagtggcatcatgactacccaacaatggaaagagagagaaaactcctagcatgtctgcaagtgagctattttgagatactacagagttgcaaatcatgctatttctaagactacccactcttttaagcctccttgacataaaatatgatccattattcttatttaatgtatctatcttcacacttcacattaaaataatggcacctggctttctggaacatgaacagcaacacaacaggattctggctacagtaagccacagtgagcatgcagctggtagaactgtgtagaacataaaatgatgacattctaatccagccctggccatcagtaacaactgctttaggaaagtcactaaagaatctgtttcatgcaagtaatggcattgccgaatgtgtaagctgctacttcttttctgaagggcaatttcaatgcgcctgccacagcaccctgtagttcatgactaggaattcatcctcaggaaacatcaacaatacaaatgtgtgaaagaggacattcactgcaacattctttataatagcaaaacactgaaaacaacctaaatgttgattgtaagggaatgttaactcatggcaccatgtatataatagcacataaatacacagaaataccatgcaaccattaaaaaatatactgcttatatgtatttattagcatggaaaatagaccacaatgtatgaaaataatatatggaaaaagcaggttaatagcagaaaccattccattatgttttttttaaagaatggtcaagtacgtgtctacagaaaaaaaaaatgtcaagaagaatacagaacaaagatttacaatgttgatttctgatgttcaaattccctgtgattgtcactttcttccttaaacttttcttgttttttttaattcttatactgaatgggtcttactcttatcctaacaaaaattgccgtttatattttgaaaaagataaaatggagcaacggtaactattcctgttcacaaagggtatactgtggggactgtatgttgtgtagaacatagtagagcaataaataggaagcatttgggcaaagtcccttttggcttcttcagctctaggaatcttctttcagttaattttttcttcattagttaagctgctaccccaatgctgtctggataagaaatgacctctgcttcaggagacctcgagatgatagctgtataccaggcacaaacagatcagaaagctctggaattattttggttctggttctcccctaagcagatcctcagataaagattcaagtgcaggtagtttaacctgggcagtgacaacatgatggactggcagggaagaaattcagaaagggaagggaaggacaccagcatgaggtgcactgtcaagcaagttccactgggggcagctggagcttcaaccccctggggaatcctaagggacaagtcagggcaagtggctcagttatcctgtctgaggagtgagaaagtagggaatttatcaactaactttcaccaatcacaggttgaaggctaatcccagggcacaggaattccctggctcttctggcctgctctgtttgcaggccaagtgggctccagggaccagagaaagccctccaagatgagtcatgggtacagacagttggaaatcggaaaaaatgctaagtgccaggggcactaagaggatatgcaacaaaaagtgacctctttgagaggagactttacctgatggtctgaacatattgagaaaacagaaagaaactaggcaaataaaaacacctgacaataactcctaatggggaaaaaagttatgtgtaaaaggaaaaaaaaaaaattagagggcatggtggtgcatgcctgtagtactagctactagggaggctgaggtgggaagatggtttgagcctggaaggtggaggttgcagtgagccaagattgtgccactgcactccaacctgggcaacagagagaggccctgtctcaataagaagagggaaaaaaaagatgggtaaggtggctcacacttataatcccagtattttgggaggcccagatgggaggatcacttgaggctaggagttggagatcagcctgggcaacataacaagagacaggtctctacaaaaaaaaaaaaatacccgggtgtggtggcatgcgcttgtagatccagctattcaggaggttgaagtgggaggatcacttaagcccaggagtttgagaatgcagtgagctataactgtttcactgcactccagcctgggtgacaaagcaagatcctgtctctaaaataaataaataaatggaaaagaaatcatagattactatgtggctctgttgtgattgtctttacatggccataatactgtaaacattgactaatgaaaattacgctgtaactacattaagaagagaaggagaaaagacaaaggtgcgtgggtttgaggacaggtttaagagagctacactgtagaattatttgagtctttcaactacgtgtaggtaagactttgataaagcagaaacaagaaccaccatcaatacaatcacggtaacaggacacctccattaataaaacacacagttgtcttggggtcagcctgctgagtatcaaactgcattccaagtttcaaataaaggattgacaaaccaactttcagaaaacagttctttgcaatacttaggagtgactttagatagcaggcatttctcaaaccaccctcctcctcctcaccccctgctccccaactcccccatccaatgcctgacaaaatcccaaagtctgcaatattagctgtagcctttgctacttacaactaaacataatcattaaaataaagtgaaagagaattctagatccagggttacagcctttgatatctgaacccacactaaacttcaaaattagatttgccttgcaaaggagctgaagaaatcactttctccactcttagcccatctatctttttttagcctatctgatgcagcctacctgtcctttttagtaatgcttgatacatgggtagcgccttggtttaaaagcacctcctcctacacctctcatctgacctcaacgctatcctgcttctcagatgagaactccacaggccacagggttgagggatctgacagacatcaggaggggacagcgacaggaacaagcaagagtgtctgagaagggctcctgtaggtaccaaagcttctccacctctggcctcagctgtggagggaattcgtggggatggagatggggatgggggtggggggatgaacttagatgggaaagaaaggttacaacttcagtttcgctgtcctccaactaaaatttaccattttttttttgcacgatcaatgtagcaaagacccacagtaaggaaatacctgtgactatcaacagaaattagacatctccacttcacatcgcggttgccgcagatctcttgaaataccatttgtgcagaccacaacgtcaacactacagtaggagttaccgctgccgctggcccctgcggtttctgcccttcatcaagaagccagtctaggaccccctcacaagtgtgttctaatcctttaggccctgtgtcttttaaatcacgttttccgggaaggagtacaaactcttcagactaccaagcccgccatttaaattgggaacttcagaggccggagccctggagccggagaccctccccgacagcacaaggtcgcccgcagcccgcgcgcccccaccccctcgacctcttggaggtggggatcccctcagggttacctgggggccccgttaggaacacgtgccgggccatactggtgggcgggggtaggggttgcggtcaggggagcagtccaggttggggtcgcaattcaggtcaggtccggaccagggtcgcgactcaggacccgcccaccgcgtgtcgcaggccccgccc

SEQ ID NO: 604 - DNA, 15689 bp, Homo sapiens
agagcccagagagctgaacctgcatcccggacctgcggcgaccgtcgtacaccatgggcctccacctccgcccctaccgtgtggggctgctcccggatggcctcctgttcctcttgctgctgctaatgctgctcgcggacccagcgctcccggccggacgtcaccccccagtggtgctgggtgaggcacgggtctcgtggtggatctgtcggtcgggcgggacgggccgcgggcggggctgccttcccggtctgcttctgttccagtcacgaaatgggggagcgtattggtatctgtcttgtcacttaggtgatctagatctgccggctcacctcccgccatgctgggcgcgggtgtggtcagctccccacctcctgtcctggtagaaaatgggggtgagtgggagagttaccatctggttattcatagttccacctgtccgcatcattcccaagccttgcctccccttatcccatttttaagctggaaagacaggtgcttcagccccactcctgagggatggtgggggtgtgtagagtggctcctgagttgacttctgcatcgacctgggcctggttaggaggctgtcaccctcgacccctccaatgccacatatgccagaaggcattgctgaaaggaacctccttagggaaaggattgctgtcctagctggccaccaactcccacaacttatcagatgtgtggcattgcctgagggaaaaggcctaagggaaactgaagacaactgaagtcaggggaaagggttgggacaatggccatgaacctgtgtcaggcaacatgcttgtactcttaccctgccacacatgcttggactagactatgtggaggctcggtgacctcccctgctcaccccgctccttgatcacaaccctggcaactctacaacggccactgtatttccttgcagggatgggcagggatgagacctctgtctggggggccttgggtgcctcattgaggccgtcactcccatccagagctggtgtgtccgtggccagccaggattcctgaaagcagaggcatctgaggcatgaattacacgtggagtctagtgcagcatgatctccatgctctttctgctgagagtactttaaatggggacgatgcaaatcacagaagggtagagttggcaggtagggtggtgccaggcaggccccaccaggagttcccagccaggaaaagctccagggggatactaggcccaggttcaccatgggatttgggcagacttggccctgcctccccaaagcttgcaggataggaataacagtgatccccagagaggaagtctgtgtggggcaagcacagagaatccaccaacccagcctggatgggtgggtgtcaagtaaggcttcctggagtatatagctggagctaaggccaggagagagtaatgggtcggggagagacgtgagcatctcaggctgcctgggatcgagtcacaggaggagtggactgcacaggacttgtgactggttgggtcatctgaactttatcttgagggcctcagggagtcctgggttggcctgcagagttctaagtctgaggggcgtggcattaggaagcatgtggtctgtggcacacaaaatggcacatagccattttgcctggattgatgctaaccgcactcatcaattcagtcagtctgtttatccttggtcacagcagaagagcctcagaccccacccagaatcacagagcagcaggagtcctaacatgcccagcttctcagggagtgaggctgctggccttagccctgggagacctcacggtgggcagttggataagcagctcctgggcacagagcagggatctgaccttgactgtcagaagatcagaatcctctaggggtggatcctgaaatggtggtggaggaaagagagaccagcgatgtgatacagaagaccctgggcaaggggaagggaccataggcaaggccatttccacctcttgcagcctcagtctccccatctgttaagtggaaatagtaaggctgtcccctcccagtgttacttgaggtgaaaggcatgtggatggctcttttcctagttccaggcgcagatgggctcaggaagtggccactgctatttttaggggccacacagcctgaccagggtaaggagcatctgagcaaagcagatctggtgacttcctcttttaccatttcccctttggtagagacagtgaccagggtctctgccctgccctgcccagtccacaggcatgtcatccagaggctgtcatgacagggactccctccctctgcacccataccatgaagggaggtgaaggcatgtgccgcccctgcctctcatggcaccctgaagacactgggatggtgcccagggagggcacgccctgttcagggtggatttacggtcagttcccagtgaatgtccaggagagccaagtgctggtttttcactcaatgatcatggaccctaaacggggatgtgtttgggaagtggcgagagcatggcatgtgggggcaggtgaggcccgaaaggtcaatgggagtaacgagactgtgaagggctttgacgcagtggggagggatttgggtgtcaccagggccccagagttctgagtacactgaataggatggctgggatggagagaagtcaccctagggcctggactgtggtgataatggtgctggttcagggtggctgtttccaatacgggctcccagccatgctagggccctccagatgatctgctctctggcaccttactggactctggcctttagtaaggcctgggcccttggtaggctggcgggtgccaatgtaagcttctctcagctgtgtttctgttcatttccctcccaccagcctgtcctgcatactttgtctggttgaattttagctgagtggcccagggctctgttctgtttccttcttcctctctcagggcgaacaggaccctgtcttctatgtagcctgggatagctatgggtggaagacttttgggttcaagcctccagggtatatatctttttttttttttgagaccgggtcttgctctgtcacccaggctggagggcaatggcacgattttggctcactgcaacctctgcctcccgggttcaagcaattctcctgtcttaggctcctgagtagctgggattacaggtgtgtgccaccacaccaaggtaattttttgtatttttagtagagatgggctttcaccatattggccaagctggtcttgaactcctgaccgcaagtgatccactcacctcggcctcccaaagtgctgggattacaggcatgagcccctgcgccctgcctcgaaggtatatatctaatgacaagggccttggccaaactttggaggttctggaatgcaaaggggtctccaagcccctcctcccaggcagagctcccatcggggtccattaaccatagaaaccatgtgtagaggtgtgtctgtgtttgctgggggtgattcagaccaagatctcatttaacagatacggaaactgaggcctagtgtggggagtgacttcaccctgaacccccttccaataatctgaatggcccaggaggatgttccagtgaaaatccaggagacttactttatctggagttggagacaatgttagggcccttccccaaacatgtcaggcctctcccaagccccccacaggcatctctgcaccacacagcagtagcagcttttctgcacaaagatggttccctggcctttgggtcaaggtccctgctctctgaatttcctgccaccagcactgtgctttaatttgagatgtggaactgcacaggtctgccatattatctgtggctcttcagggggtctgctgcagacatcaaagttcttgggagtcttgaacctgccgggctgagggctcacacatgtcctgtgccccctgcagtccctggtgatttgggtaaccaactggaagccaagctggacaagccgacagtggtgcactacctctgctccaagaagaccgaaagctacttcacaatctggctgaacctggaactgctgctgcctgtcatcattgactgctggattgacaatatcaggtgggggctggggcacacagaggggggtgctgctcaccaacagtgcctgagaggcctccagagtctgttccttctatcctcatctcgaggtcactgacctctctccttccccaggtcctcggtctggtctggtctggtctggttggcaccacctctgcactcccaggcagaactaactttcccttcctgctgcccttgttcctctactctccagtcctggcctctcatgcctacacacaattttttttttcttttattttgggatggagtcttgctgtgtcactcaggctggcgccatctcagctcactgcaacctccgtctcccaggttcaagcgattcttgtgcctcagcctcccaagtagctgggattacaggtgcccgccaccatgcctggctaattttttgtatttttagtggagatggtgtttcaccatgttggccatgctggtcttgaactcctgagctcaagtgttctgcccaccttggactcccaaagtgctgggattacaggcatgagccactacgcctgcctacacaaaatttctgtgtcccagcccctattcagagcctcggcatggcccccacccctttccttgtctgtgcctcggcctcccctacctctccagctgcttattcttcttgggacatgccatgtctttgtacctgctgttcttttggcctggaatctatttctacaccctttgcctgataaatggcttccattcacttttttttttttttttttttttggagacggagttttgctcttattgcccaggctggagtgcaatggcgcgatctcggctcacaactcttttttttttttttaacttttattttttgagacagagtcttgctctgtcgcccaggctgggtgcagtggcgctatctcggctcactgcaagctccgcctcccgggttcacgccattcttctgcctcagcctcccaagtagctgggaccacaggcgcccgccacagtgcccggctaattttttgtattttttagtagagacagggtttcaccgtgttaaccaggatggtctccatctactgaccttgtgatccgcctgcctcagcctcccaaagtgctgggattacaggcgtgagccaccacacccagccccattcactctttaaaacatgaccctaggccaggcatggtggctctgctataatcccatcactttgggaggctgaggcagtcagatcacctgagctcaggagttgaagaccagcctgggcaacttggtgaaaccccatctctaccaaaaatacaaaaaaattagctgggcatggtggcatgcacctgtagtcccagctacttagggggctgaggcaggagaattgcttgagccagggaagcagaggttgcagtgagcagaccactgtacccagcctgggttgcagagcaagaccctgtctcaaaacaacaaaaacctgaccctggtccctttgtgacatgtcccttttgactccccagagcggtttgcctctcctcccaggccccatgcttgcttcctctaaacatcatcatgtgcccgaatttgtctgcaggcatgtttgcccaaattgcacaggcactgtacattttatatactttctttcagttagtcttacagcaaccccgttttgaaataggtgctgttttctttttttttttttcaccagtgttacttgccaacaggtggtttttaaacctgctttacaactgcgaaatctggaggctcaatgaggttacaaaattgactgtgctcactcagctaataagtggtagaatcagaattcaaatccagaatgtgtggcgttgagctgaggttccctcccaggctgagttccgtgaagggagggagtgtgtgtctgttttatccttatagcagtagaaccagaaacacagttggcgcctgataaatgtttgagctgaatggagtctcccaaattaaaagtttttcctggtcgggtgcggtggctcatgcctgtaatcccagcactttgggaggctgaggtggacagatcatgaggtcaggagttcgagactagcccggccaacacagtgaaaccctgtctctactaaaaatgcaaaaattaaggccgggcatggtggctcacgcctgtaatcccagctagtcaggagtctgaggcaggagaaacgcttgaacctgggtggtggaagttgcagtgagctgagatcgtgccattgtactccagcccaggtgacagtacaagactccatctcaaaaaaaagaaaatacaaaaatacaaaaatgagccgggcgtggtggcacacgcccatgatcccagctactcgggaggctgagacaggagaatcacttgaacctgggaggcagaggttgcagtgagcagagatgggggcactgcactctagcctgggtgacagagcgagactgtctcaaaaaaaaaaaaaaaaaaaagtttttcccagagacccgctagctgctcctccaggtgccctggcctgccggctgtttgtgatgcccattttgatgactccttcctcctctgtgtgttgtgtgactggggttatttctgggctgttgatgtgcatttctatttttatactggggacacagcctcaggtgctgccagttggaggtgccagctgataccaagaggggcctgtctgccttcactgcttctctgacccgtttagattttcacccagcgcagaactgctttggctttccagaacagttttctgcattttgctgtttgataatttatttttagtagcaacaagctactttgctatgtggtcattgggataatctacaaattgccctggagagaatgggcctccaggacctgttatctgggtcagttgtggggatcctgtcagcttcagtggctgatatctaagtgggcaagtgggactcaggaccaccagaaactccaggttcctgtgttttgggggcacatttgcttcttcagtgtgtggcgaggccagagcaaggttcccagcctcgcacagaggcacaaggcttttctcctggtataaggtgtctcccctggcccatcaccctgttcccatcatttcttcaggccttgacaaccctcttcccacaggagatggtgcagcagctgtgtactgagccctgaggcggggtctgtcctgtctggttctgtttggcactgcagctacagaaactatgagatcacgtgtgtggtgttagaagctgctgagtctgtggtaatttattacacagttctagaaaactaataggctgggtgcagtggctcacacctataatcccagcactttgggaggctaaggcaggaggatcgcttgagcccaggagtttgagaccagcatgagcacatagtgtggccctgtccctacaaaataaataaacaaataaataaataaattagccagacctggtggtgcctgcctagctgttcaggagggtgaggtaagaggatcacttgagcccaggaggttatggctacagtgagctatgatctcctcactgtgctgcagcctgggcaacagagtgagaccctgtctcaaaaaagaagaagaaagaaaagtaagaaagggctgttagggatcttaagtcagtagctggtggtccatgtcctatgtcatggcgcttaggaatttgctgggcaagccctgagccttgtggctgcagtctgacagttgatacagccctggggtactgggaggtcataggagcatggttcattcccttcctccatggaggatgtgtttggaggttggctggctgctgtgtccaatgcgcagaggaagcgggacccaattatacctacctggggccacacaaggccttcctcctgtctctccccaccagctcccatcatttctctgggccttgctccttctcctacctgcctacccacccatacagcagccctgaggcatggtgcctttctagggtttgtttttgtttgtttgtttgtttttttgagacagagtttcgctcttattgcccaggctggagtgcagtggcgcaatctcggctcactacacctctgcctcccaggctcaagcacttctcctgcctcagactccggataactgggattacaggtacacgtcaccatgcctggttaatttttgtgtttttagtagagatggggtttcaccctgttggccaggctggtctcgaactcctaacctcaagtgatccacgtgcctcagccttccaaagtgctgagattataggcgtgagcccctgtgcctggcctagtgtgttttgttttgttttttttttttttttgagacagggtcttactttgctgcccaggctggtgtgcagtggcatgatcacggctcactgcagcctcaatatcccaggtgcaagtcatcctcctgcctcagccttccaagtagctgggaccacaggcctgcaccaccatgcctggctaattttttatttttagtagcaacaaggcctcactgtattgcccaggctggccttgaactcctggcctcaagcattcctcccaccttggccttgcaaattgttggaactacaggtgtcagccactgcacccggcccctgtctggttctgttgtgtactgcactcaccacctccttcacctgggatacgttgggctggcaggagctggatgcaaggagatggagcgatggaaagctgaaagagggtagactgcctcttggggtccagtgtgaagttcacggcagaatcaggactggtacttccttctcccaaccaggtccaagaccctcattctagagtagggtcacgggggagaggggaatgttgctttgacaggggtcctggggtcagtatttggagtaagtatgccttggtggggtcctcatttggatgtaattactctgatctgtgctttttatttttatttatttatttatttatttatttatttatttatttatttttttgagacagagtcttgctctgtcgcccaggctggagtgcagtggtgtgatctcagctcactacaacctccgtgtcacaggttcaagcgattctcctgcctcagcctcctgagtagctgggattacagtcgcctcccacgacacccggctgattttgtatctttagtagagatggggtttcgccatgtttgtcaggctggtctcaaactcctcactcaggtgacctgccagcctcagcctcccaaagtgctgggattaacaggcgtgagccactgcacctgggcaatttttgtatttttagtagagacagggtttcaccatattggccaggctggtttcaaactcctgacctcaagtgatcctcccacctcagcctccctaagtgctgggattacaggtgatctgtgctttatcaacctgctttgttacttttcggtctctcctatccatctgaccaaacctgggcatgagaagggagtatgactcaggacatgatgcactgttgggacacaccaagctcagtgtcccctccgggtcactggctcaatatcctctcacaacaggctggtttacaacaaaacatccagggccacccagtttcctgatggtgtggatgtacgtgtccctggctttgggaagaccttctcactggagttcctggaccccagcaaaagcagcgtgggtatgtagcccttactcaaggcctccgggagctgggatggggtttctgccggactggagctggagctggaggaactctgctggtttgtagggacagcctgtgagctgtctctgatcagcgtgggcacagagccctgtagcattcttccaaggacctgctagctgtcacagtctccatgctgggcatagtgtaggtggccggcactagctgtatcttttcttatcctctgtatttctgtctacaggttcctatttccacaccatggtggagagccttgtgggctggggctacacacggggtgaggatgtccgaggggctccctatgactggcgccgagccccaagtaagcaggcactctcattccctccctgacgtctcgggaggtaggggtgaggtgatcatgggcaccacagaccttgggctctccccttgtccttggctgtctcctgtccctgggcctctggcatccagtctagtggtcacagccaccacctttggtcagtcttatcctgtcctccatttcccaccctgggacctctgggcctgtgagccctggggagaaatataaggcttcctcccttcatggaaggcggggggacccagaccgctctgtttgaatgtgagcaccctcccctccccctctcgtcttgtgtctggcctgagaaaagctcagtggttccggctccaggacccttcccacctgacccctgcctggctctggcctgcagatgaaaacgggccctacttcctggccctccgcgagatgatcgaggagatgtaccagctgtatgggggccccgtggtgctggttgcccacagtatgggcaacatgtacacgctctactttctgcagcggcagccgcaggcctggaaggacaagtatatccgggccttcgtgtcactgggtgcgccctgggggggcgtggccaagaccctgcgcgtcctggcttcaggtaagaccctacctggcccagcgtggggggctgttgccaggaattctgccctctcttcccttcctaagtgtcctcctgggccagcatgcctcgtgtctgtcccacggtgtgtggggtctatgcaaatctacccctaaaagtccaaagaagaaagaggctgacaaatctagtttctcagagaaaagcatttaatagggacatacgaatagaagccacatctgtgtctcaggtgggggcaagacaagatggtggatccccacactattagcccccagacccagagcttatattctgtagggaaagggcgactccgatgcgatgtgttgaacattgaaggatgataacacagaggctgttttgatttatggttaagtacgtgcacaagaaacagtagataaagtggaaatctcagtggccttcctggatctggggttaatcagaagccaacatggtggattagtatccaaaatggagttgctttggtctccacaatgactattctcttgggtcagccctgttttttttttaatttttattttttgagacagagtctggttctgtcacccagactggaatgcagtggtgcaatcttgtctcactgcaacctctgcctcccgggttcaagcgattctgcctcagcctcctgagtagctgggattacaggtgcccgccaccatgcctggctaagttttgtgttttagtagagatgaggtttcatcatgttggccaggctggtcttgaactcctgacctcagatgttccactcgcttcggcctcccaaagtgctgggattacaagtgtgagccactgtgcctggccatccctccctcttaccccatccttacttcttcatccccaccttcaccgcagaggaggaaggctagagcattttttttttttttttggaggcagggtctttctcactctgccatccaggttggagtgcagtagcgtgattttggttcatgcaacctccaccttccaggttcaagtgattctcctgcctcagcctcccgggtaactgggactacaggcgcgtaccaccacacccggctaatttttgtatttttagtagagactgggtttcactatgttggccgggctagtctctaactcctgacctcaagtcaggaggatctgcctgcctcagcctcccaaagtgctgggattacaagcatgaaccaccgcacccggccagatttttttgtatttttagtagagatggggtttcaccattttggtcaggctggtcttgaactcctgacctcaaatgatctgcccaccttgacctcccaaagttctgggattacaaggatgagccactgcacctggcctctagactacagttttttatttatgagttgcgcctccatctgtgggcagcacggagcctctgtaggcaacacagggaggaagcaggtgcagatctggctgggcctgcttgcctggcaattgggaaagccaccccttttatggctcctcccccgtcttttcatgactgttgcagctcaccagctgcagctgtagagtagagcttcttcctctagaagggagctttcctccctctgctaggacttgggggaggcttatggaccctcactttgggagctatgagccagggctgtgccaagcatctcatgagctcaagtgcctgccactgcttgacctgcttggtctactggcattgtgattgggtcaggcccagtgactctgagttggctggaagacactcagatttagtgaggactcattatagccaccacttcggtctagcctgggcctggagggacggatgtgggcataccctgagtttagacaggtagccccggcccctttcagagtttctctgtgagtccccttagagctttgtttcaaaggctgggaagctgttctgtcctgccttggcagtccaggactgggtgtgtggtgcggggaggtggaagtccgtgcacccctaggggctttccttgcctcaggggtcccccagccaggccacagcaggcagagctgaggccctacagtcagtctgagaggcctccctgctttcagatacagggtggggtgatgggtgaccatggatcctgaacaggccagaggcccctgttcccaagttgcagcttttacttcctggaggcctccctgactgccgggtgtttgtgttgttcacattcctgtgtatagggactccgcctccatctgcagcctcccctcgtgccctgtctccagcacgcctggctgcccaggtcagcgcacatgcaagtgggtggaatgaggccacggctggctgaacgctggtctgagcttaggaaaagaaaaactggtacacagttcagtgtcataaaagggaaagcagaacatgtcatctccgagttgccaacctgctgactcactttagactaggtcagtgcccacaggcctgatcagcacttggaggatggtagagtttacaggcaaggaagcatcataaatcaccctgtgggtatgtgccgccttactccctggtgaggaaagcaaaaaaaacaaaacatagcttggatgtgtggttcccagatgtagcaaaaataaagagaaacaataaaagccaaggcaagcaaactgggcaacatagcaagaccccatctgtataaaaagtggaaacatttttagcccaggcgtggtgggacgtgcttgtagttccagctatgcaggaggctgacataggaggatcacttgaacccaggaggtggaggttgtagtgagccaagactgtaccactgcactccagcctgggtgacagaatgagaccctacttcaaaaaaaaaaaaaaggaaaaatttgccaggcatgaggcatggtggcgcatacctgtagtcccagctactccaaaggctgaggcgggaggattggttgagcctgagaggttgaggctgctgtgagccgtgatcatgccattatactccagcctgggcaacagagtgagaccctgtctcaaaaagaaaaaaaaagagccaaggcagggatgggagtcacagtgattacaatgatgataaccgggtagagatgcgggactgtggactgggcccctggctggggtctggcaggggcctggtggtgaacatgctgcccaaccagctggcattcctaagcacagactgaccagagccttctccctgcaggagacaacaaccggatcccagtcatcgggcccctgaagatccgggagcagcagcggtcagctgtctccaccagctggctgctgccctacaactacacatggtcacctgagaaggtgttcgtgcagacacccacaatcaactacacactgcgggactaccgcaagttcttccaggacatcggctttgaagatggctggctcatgcggcaggacacagaagggctggtggaagccacgatgccacctggcgtgcagctgcactgcctctatggtactggcgtccccacaccagactccttctactatgagagcttccctgaccgtgaccctaaaatctgctttggtgacggcgatggtactgtgaacttgaagagtgccctgcagtgccaggcctggcagagccgccaggagcaccaagtgttgctgcaggagctgccaggcagcgagcacatcgagatgctggccaacgccaccaccctggcctatctgaaacgtgtgctccttgggccctgactcctgtgccacaggactcctgtggctcggccgtggacctgctgttggcctctggggctgtcatggcccacgcgttttgcaaagtttgtgactcaccattcaaggccccgagtcttggactgtgaagcatctgccatggggaagtgctgtttgttatcctttctctgtggcagtgaagaaggaagaaatgagagtctagactcaagggacactggatggcaagaatgctgctgatggtggaactgctgtgaccttaggactggctccacagggtggactggctgggccctggtcccagtccctgcctggggccatgtgtcccccctattcctgtgggcttttcatacttgcctactgggccctggccccgcagccttcctatgagggatgttactgggctgtggtcctgtacccagaggtcccagggatcggctcctggcccctcgggtgacccttcccacacaccagccacagataggcctgccactggtcatgggtagctagagctgctggcttccctgtggcttagctggtggccagcctgactggcttcctgggcgagcctagtagctcctgcaggcaggggcagtttgttgcgttcttcgtggttcccaggccctgggacatctcactccactcctacctcccttaccaccaggagcattcaagctctggattgggcagcagatgtgcccccagtcccgcaggctgtgttccaggggccctgatttcctcggatgtgctattggccccaggactgaagctgcctcccttcaccctgggactgtggttccaaggatgagagcaggggttggagccatggccttctgggaacctatggagaaagggaatccaaggaagcagccaaggctgctcgcagcttccctgagctgcacctcttgctaaccccaccatcacactgccaccctgccctagggtctcactagtaccaagtgggtcagcacagggctgaggatggggctcctatccaccctggccagcacccagcttagtgctgggactagcccagaaacttgaatgggaccctgagagagccaggggtcccctgaggcccccctaggggctttctgtctgccccagggtgctccatggatctccctgtggcagcaggcatggagagtcagggctgccttcatggcagtaggctctaagtgggtgactggccacaggccgagaaaagggtacagcctctaggtggggttcccaaagacgccttcacgctggactgagctgctctcccacagggtttctgtgcagctggattttctctgttgcatacatgcctggcatctgtctccccttgttcctgagtggccccacatggggctctgagcaggctgtatctggattctggcaataaaagtactctggatgctgtaaggtg

SEQ ID NO: 605 - DNA, 384 bp, Homo sapiens
tatggtgctggcatataaccagctgtcaggtctttgcccactctgttcgcccctgcttcctggcgcagggagtccatgtcctctctggttccccaggtttgcgagagtggagggggaccacgagctcccgatgcctctcctgctctgcaggggaacttgcagatggcccatggcgcagggtcgagactcaagcccactcccaaccccgcgcccgaactgcccggactggcggggtgacgctgcactctgcgcccctaaaacgaacagattaacccctctcttgggaactgaacatgctgacctggcctctcccggttccccccgcatctgtaaccccggggcagagttacaggggctgactggccgcacccaggtgccctcggg

SEQ ID NO: 606 - DNA, 3871 bp, Homo sapiens
gaggcaggaccttgtcctattcattaatcttgcccctcaacagttattttcagaggggcaagaagtgtttcagggttcttggcccttgtttgaccagtcgtcctaaccctcatgtcttgggtcattgttgttataatctggggttaccttttggaaggtcatggggtacccttttgcaaaagttatgggccctctccttggaaactgcacacacaccatgcagcttacaattcagggagttcacaggtctacagaatcctggaaactctcatgtccggttctactcattgtagcttcagtggaaccttctagcagtcctttccagctcctccccagctcctcagctctgcttccctccgcccatcaagccctcctcagcccataaggtgggccaggtggcctgtggggataaatcagagtgcccacaagtgcaggggcccaaagacatcccagagcaaacccaagaatccctctacaagccccagcccactcagaaggatgcattttgccccctctgtttatttgtttgtttttaattatgaaagtagggcatggtcattgttgaaaatgtgagaaatgcagagaagttaaaatgatgctttttgtttagggcgctgctgcttctggcttaagatcctaaatcaaagcagctgccagatctggacctaagacttgcttcccatcaccttacataaaagaaagagcactggactaggaatcaaagatctgaattcccatcaaatctctgctattactagcttttatctctatttatttatttatctgtctatctatctagtaccttttgtgaatatgagtgtttctcaccgaggccctcccatctctcttgcccccgatcctggaatggaccaaataccttgtttactgaaggatacagatggcatgtgactgttgagaatcactcaccctcttagagccatggtttcctcttctataaaatagggatgttcgtgcctatttgctaatcatgagtgacaatgacataaggtacataaagctgtactgcatgatgcaaacataacatcatatttgtagggttgttgctaataatactatccatcagcaaagcagtcattcatttactcagtcaaatactgatgcactggtacattcagtttcctcttttgtaaaatggggataaaaataggacttagctcatagggtatttaagattcagtgagttaatatatataaaatacttagagcagtccttggaacatattaagaactcaatacatattagctagttgagcaggctgtagtatttgttccagccaagaaaagactgttctctaacagcacaggaaataaagatggggttaggcacgacacggcagcaggacttaccttctgtctaattcagctggcagtcaaagaaagaattattagaagcctatgagcttgttctcccaaagatctactgagtacagggggatatttaaagaataaaaatccctagacccacttacagtacaggagagacaagaagctgttcacacaataacaagtgctaaattccttgatttttatactgacagctgaagttttagagaagagaaggatcaataaagaccggaatattaaagcagacaggcctaaaagaggattttagatttgataaagaattcctccagttctcagagcagggactttggagggtaacaacttggatttcagtccttgcctgccacttactgattgtatgaccttggaaaagttacttcacttctgtgagcaatgattctctcatctggaaaacaaaacaaaacaaaaaaactaacaagggtgataataatacctacctccctacctcatagggctgatgagaagattaaaaagtacctacataaagcccttctctgcgtgcctggagcatggcaagggctccatgtgaaccactattttttttttttttttttaatgaaaagtcatgggcagcaccaaagctcagaattttggcagtaaggaattatgattctacattgaaatttgccagaaggggagctgactgcctcatgagacatttttgaatgaggccaaaaaaggaaacaagtgtatcctgggattttacgagatgctaggtatgtccttagcacttaatcctcatgactaccctatgatgtaagtactatctgttgtccctattttacagttggccaaggtcacatagctgaaacggacttctgtgtgtcttctaacttttgctttcaggtctggaaaaatgcaatgtaaacctagaccctctttgaaatactgaagatggtaatcttatcccttcctcactttctgttttctaaaataacagtccttgttccttacaatgtctgttttccagattcttagaagactttttgcttattttccataactctttacttgtgatccctgaatgacaccgggggtatagcagagaatgtccatttcctcaaagttcaaaggtcctacaaaaaatagttgctagcctggcatgatggtgtgtgcctgtagcctcagctacctgggaggctgaggcaagaggattgcttgagctgaggagtttgaggctgcagcgagccatgatcacgccactgctctccagcctggatgacaaagcaagatcacatcttaaaataaaataaaataaattttaaaaatatataaaaaataaaaagtggtgccactaagtgtcctggacagcattagagaaagcaagagatagaagagtgcaaacacctgaaaggaaagagatgcgggtcttccctctcccttgagtagccaccggctatccctggagcataggagtaggattttatcccccagcttcggcctccccaggcagcacttcctttctgtgctttgactccaatttggatggtgctcaggcgggaagtaggctggggtgggaggagtttaggggaatatttgtcttctctcctgttttgccctagagattctggccaggaagacaaatggctagtaccacttggtccttttcttttcttcttttgagacagggtcttgttctgttgcccaggctggagtgcagtggcgtgatcgcggctcaccgcagcctcccaggctcaagcattcctctcacctcagcctcctgagtagctgggaccacagctccactaattttgaagtttttttggtagacatgaagtctccctgtgttgcccgggctggtctcaaactcctgacctcaagcagtcctcctgtcttggcctctggaaatgctgggattacaggcgtgagccactgtgctggcctcttttttctttttctttttttttaaggtttttatttgttaaatgggaagtctgtgccatcaactgagcattgtattttctccttagtaagagcctgggtgggccactgggagagaactatacattaaatgtaagtagcctctgggtagagagcccctggctggtttcctttcctttctctccttttctctactttggtgtctggaggcatttcccagactccagtttcttaccaccctcacggattttgctattgtattatcacctcctttatcattcccaaaattgactttatggagactcattaaaagaaaaaatcatcggccgggagcggtggctcacgccacgaaggcgggcgaatcacctgaggtgcggagttcgtgaccagcctgaccaaaacagagaaaccccatctctactaaacaatacaaaattagctgggcgtggtggtgcacgcctgtaatcccagctactggggaggctgagacaagagaatcacttgaacccgggaggcagaggttgcagtgaccaaagatcgcactattgcactccagcctgggcaacaagagcaaaactctatctcaaaaaaaaaaaaaaaaaaa

SEQ ID NO: 607 - DNA, 3872 bp, Homo sapiens
gaggcaggaccttgtcctattcattaatcttgcccctcaacagttattttcagaggggcaagaagtgtttcagggttcttggcccttgtttgaccagtcgtcctaaccctcatgtcttgggtcattgttgttataatctggggttaccttttggaaggtcatggggtacccttttgcaaaagttatgggccctctccttggaaactgcacacacaccatgcagcttacaattcagggagttcacaggtctacagaatcctggaaactctcatgtccggttctactcattgtagcttcagtggaaccttctagcagtcctttccagctcctccccagctcctcagctctgcttccctccgcccatcaagccctcctcagcccataaggtgggccaggtggcctgtggggataaatcagagtgcccacaagtgcaggggcccaaagacatcccagagcaaacccaagaatccctctacaagccccagcccactcagaaggatgcattttgccccctctgtttatttgtttgtttttaattatgaaagtagggcatggtcattgttgagaatgtgagaaatgcagagaagttaaaatgatgctttttgtttagggcgctgctgcttctggcttaagatcctaaatcaaagcagctgccagatctggacctaagacttgcttcccatcaccttacataaaagaaagagcactggactaggaatcaaagatctgaattcccatcaaatctctgctattactagcttttatctctatttatttatttatctgtctatctatctagtaccttttgtgaatatgagtgtttctcaccgaggccctcccatctctcttgcccccgatcctggaatggaccaaataccttgtttactgaaggatacagatggcatgtgactgttgagaatcactcaccctcttagagccatggtttcctcttctataaaatagggatgttcgtgcctatttgctaatcatgagtgacaatgacataaggtacataaagctgtactgcatgatgcaaacataacatcatatttgtagggttgttgctaataatactatccatcagcaaagcagtcattcatttactcagtcaaatactgatgcactggtacattcagtttcctcttttgtaaaatggggataaaaataggacttagctcatagggtatttaagattcagtgagttaatatatataaaatacttagagcagtccttggaacatattaagaactcaatacatattagctagttgagcaggctgtagtatttgttccagccaagaaaagactgttctctaacagcacaggaaataaagatggggttaggcacgacacggcagcaggacttaccttctgtctaattcagctggcagtcaaagaaagaattattagaagcctatgagcttgttctcccaaagatctactgagtacagggggatatttaaagaataaaaatccctagacccacttacagtacaggagagacaagaagctgttcacacaataacaagtgctaaattccttgatttttatactgacagctgaagttttagagaagagaaggatcaataaagaccggaatattaaagcagacaggcctaaaagaggattttagatttgataaagaattcctccagttctcagagcagggactttggagggtaacaacttggatttcagtccttgcctgccacttactgattgtatgaccttggaaaagttacttcacttctgtgagcaatgattctctcatctggaaaacaaaacaaaacaaaaaaactaacaagggtgataataatacctacctccctacctcatagggctgatgagaagattaaaaagtacctacataaagcccttctctgcgtgcctggagcatggcaagggctccatgtgaaccactatttttttttttttttttaatgaaaagtcatgggcagcaccaaagctcagaattttggcagtaaggaattatgattctacattgaaatttgccagaaggggagctgactgcctcatgagacatttttgaatgaggccaaaaaaggaaacaagtgtatcctgggattttacgagatgctaggtatgtccttagcacttaatcctcatgactaccctatgatgtaagtactatctgttgtccctattttacagttggccaaggtcacatagctgaaacggacttctgtgtgtcttctaacttttgctttcaggtctggaaaaatgcaatgtaaacctagaccctctttgaaatactgaagatggtaatcttatcccttcctcactttctgttttctaaaataacagtccttgttccttacaatgtctgttttccagattcttagaagactttttgcttattttccataactctttacttgtgatccctgaatgacaccgggggtatagcagagaatgtccatttcctcaaagttcaaaggtcctacaaaaaatagttgctagcctggcatgatggtgtgtgcctgtagcctcagctacctgggaggctgaggcaagaggattgcttgagctgaggagtttgaggctgcagcgagccatgatcacgccactgctctccagcctggatgacaaagcaagatcacatcttaaaataaaataaaataaattttaaaaatatataaaaaataaaaagtggtgccactaagtgtcctggacagcattagagaaagcaagagatagaagagtgcaaacacctgaaaggaaagagatgcgggtcttccctctcccttgagtagccaccggctatccctggagcataggagtaggattttatcccccagcttcggcctccccaggcagcacttcctttctgtgctttgactccaatttggatggtgctcaggcgggaagtaggctggggtgggaggagtttaggggaatatttgtcttctctcctgttttgccctagagattctggccaggaagacaaatggctagtaccacttggtccttttcttttcttcttttgagacagggtcttgttctgttgcccaggctggagtgcagtggcgtgatcgcggctcaccgcagcctcccaggctcaagcattcctctcacctcagcctcctgagtagctgggaccacagctccactaattttgaagtttttttggtagacatgaagtctccctgtgttgcccgggctggtctcaaactcctgacctcaagcagtcctcctgtcttggcctctggaaatgctgggattacaggcgtgagccactgtgctggcctcttttttctttttctttttttttaaggtttttatttgttaaatgggaagtctgtgccatcaactgagcattgtattttctccttagtaagagcctgggtgggccactgggagagaactatacattaaatgtaagtagcctctgggtagagagcccctggctggtttcctttcctttctctccttttctctactttggtgtctggaggcatttcccagactccagtttcttaccaccctcacggattttgctattgtattatcacctcctttatcattcccaaaattgactttatggagactcattaaaagaaaaaatcatcggccgggagcggtggctcacgccacgaaggcgggcgaatcacctgaggtgcggagttcgtgaccagcctgaccaaaacagagaaaccccatctctactaaacaatacaaaattagctgggcgtggtggtgcacgcctgtaatcccagctactggggaggctgagacaagagaatcacttgaacccgggaggcagaggttgcagtgaccaaagatcgcactattgcactccagcctgggcaacaagagcaaaactctatctcaaaaaaaaaaaaaaaaaaaag

SEQ ID NO: 608 - DNA, 280 bp, Homo sapiens
tcacgcctgtaatcctagcactttgggaggcggaggcaggcggatcacctgaggtcgggagttcgagaccagcctgaccaacatggagaaaccccgtctctactaacaatacaaaaaaattagccgagcatggtggcgcatgcctataatctcagctacttgggaggctgaggcaggagaatcgcttgaacctgggaggcggaggttgcagtgagccgagatcgcgccattgcactccagcctgggcaacaaaagcgaaactcggtctcaaaaaaaaaaa

SEQ ID NO: 609 - DNA, 6654 bp, Homo sapiens
  misc_feature (554)..(554): n equals a,t,g, or c
  misc_feature (640)..(640): n equals a,t,g, or c
  misc_feature (650)..(650): n equals a,t,g, or c
  misc_feature (953)..(953): n equals a,t,g, or c
  misc_feature (1019)..(1019): n equals a,t,g, or c
gaaactgtcttctactgactgtttcaaaaccgaggccttcacatccccggaggccctgcagcctggggggactgccctggcgcctaagaagaggagccggaaaggccgggcaggggcccatggactctccaaaggcccgctggagaagcggccctatcttggcccggctctgctcctgactccccgagacagggccagtggcacacaaggggccagtgaggacaactctggtggaggaggcaagaagccaaagatggaggagctgggcctggcctcccagcccccggagggcaggccctgccagccccagacaagggcacagaaacagccaggccacaccaactacagcagctattccaagcggaagcgcctcactcggggccgggccaagaacaccacctcttcaccctgtaaggggcgtgccaagcgacgacgacagcagcaggtgctgcccctggatcccgcagagcctgaaatccgcctcaagtacatttcctcttgcaagcggctgaggtcagacagccggacccccgccttctcacccttcgtgcggngtggagaagcgagacgcgttcaccaccatatgcactgttgtcaactcccctggagatgcgcccaagccccacaggaagccttcctnctctgcatcntcttcctcatcctcgtcatcgttctccttggatgcagccggggcgtccctggccacactccctggaggctccatcctgcagccgcggccctccttgcccctctcctccacgatgcacttggggcctgtggtttccaaggccctgagtacctcttgccttgtttgctgcctctgccaaaacccggccaacttcaaggaccttggggacctctgtgggccctactaccctgaacactgcctccccaaaaagaagccaaaactcaaggagaaggtgcggccagaaggcacctgtgaggaggcctcngctgccgcttgagagaacactcaaaggtcccgagtgtgcagctgccgccactgccgggaagccccnccaggcctgacggcccagctgacccggccaagcagggcccactgcgcaccagtgcccggggcctgtcccggaggctgcagagctgctactgctgtgatggccgggaggatgggggcgaggaggcagccccagccgacaagggtcgcaaacatgagtgcagcaaggaggctccggcagagcccggcggggaggcccaggagcactgggtgcatgaggcctgtgccgtgtggaccggcggcgtctacctggtggccgggaagctctttgggctgcaggaggccatgaaggtggccgtggacatggtaagaggccagcccagccagggtggggagtgtggggttccaaaggacaggcaggcaggcagtcggggagccccttgtttctagtgctacagtgtgggccaaatgtgtctgcagtctcgggacaatctgcagagtcctgagcctctctggggtgtgtgggggaagtggaggcacccatctggctaaggcaggtcacactcacctaccctgtcccaggagacttcccgccggggcccgtatgcccagccaccgccactctcccactcacctggcatcttcaggctccagccccacccagaatccactgggcccctccccatgctgtcaccggagatgccaaggcccagagaacacgaggactcccaagattgaacatcagggctgccccgggcggtgcaagagcaagttgcccaccctctgttcctgtctccattgcctctgggatgaagctaagggctcaggaagaccctctctggcgacacaggcttggtgcatggacccagtcacagggttcctccctctgcaggacagtccatggggtcacacagtcacaacaggcagggcggggcagatccagaccctctcaccattggctctgagaccagctttggaagccatagtcactgagcaccaacatgagagagggaactctggggctgtgccgccatgcacctttggggctgtgacctgccctctctgtgcctccgtcccctcgcccctaacgtgggtatgagggtgcccatggaggaggggtcgggagggttaaaaggtgggcacctctgagcccaccgagcacagcagccctgtgatagtcagtgcagaggggcctggtggctctggtgacagcagggtgacgttcttcgtggtgtcaccacttccccagtaccatagagtacctctgtgcccttctgagggaggggtcagtgggggcggtggggtgcacctctcccccggggccatgcttctgcccccacattcaaccccgactccactgcctcatccagacttccgtggagtgacgctcccggctctcagcgctgtgtggtggctctcagtggggacgcctgcagccttctctggcccctgccctgagtcccatcccctccactccttccttcaacccactatgtgcggctgaggtcacaggggagccagaggggcttggcaggggtctccagaggccctggacaaacactgcctgcatctgagtgattcagtgacccagcacagtggccccagccggtggcttcgcccctccccctgcccagcctcctcccccgtcgctgcactgcccacctgctcctcgcagtacacccctgcagcccctctgagcagcccctgctcctgacagttgccgtggcattgcctggccaaaccaaggtcccggtgggggcccactgtgtttgccacccacgcctcctagtgtgtgtcttgggcacctgcttcccactgcccatggggatggctggagaccttctccacgcccagacgccctgcccacctcactccaccctccacctcagaggaaggctggccccgacaggactcctgcaggttcctggtgccgcgggccttgcttacccagcagatggtggccttgggcctcttccctctccccttcccagttagtgattttttgcctctctcctgctttctgtctctctctgtctctctctctctctctctctctctctctctctctctctctctctctcattactggctccttcccagcgccttgaaacaggttcaagtctctcccgtcatcaaaaaataataaccctcagatcaccagccccagctggctgccacctcccctgcttcacagccccattcctgaaagccttgtccccacggcatcctcggtcccgcagcctcaccaggggctccccgacactcacgtcccaccaggctgagatcaggtcgtctccacatcccctgcagccagcactggccggccgaagggaggaggggtcagccccgagcaccgaccaccccatcctgtccctggcccatgggtgtcttaaccgcccatgcacacacaaggtcctgctggactgaggagacagtgtgtgttggagaggcgctagcttccctacaccacgcgggggctggaacttgccagcccagcccatgcctgtctgctgtgccatgctccagaaatggcctgacagcctgcgcaactagggctgccccgggaaggtcggaaccaggaacaccctgccagacagatgggacatcctgggagaatgggcagagtctggggcttcccagggtcacttttggctcaccaccccttcctgcctcagtggcttgggggcgccatgctccttggagtgagaccctggttcaaatcccagctctgccgagggctggttccatagctccaggcgagtcacgcatgctctgagaactccacaatgtcaaaccccgttagcaggattgtggggttctgtggatcatgtgggacctgcctggcatgtggaaggggcttggggtgcagctgtgtccctggccccagcactgccacacccctcggtaccttgacctcacttttgcgctctggagggcagaacctctgagccagctctcagggataccttttttcctcgatggccttttctgggaactgccctcgcctgctatctctgagccctgcctgcccttcccccaaagccatcatagacccctacctcctatccagatggagcctggccatggaatgcttggggtgagagggacccatagcgggctccgggcattgttagggggctaggtggtgtctgcagaggccccacctgtggcagggtttacatgccgccacccctgccctcctcttgggtagctggggtcagaagggcctgaggcctcactctctctgcatcttagtttcttcacatctaaaatgctattcatatgcctgcctgagggtggttggggcctccgtgcagtaagtggagagaagccttcagccagaggacccccatatgcttaaacatccagacaccaagggccactcacagacagcagccggcttgtgtttcgtcatcccttttgggtcaggaactggggacgctggactccagatctccaggaggccatcccagactaggcgggaaggaggcctcagccctgagctgaaaacctgaaattctagaataaaccccaggccccactcccagcatgggcagcggggaggggagtgttctgacatttctcagctgctgtggttgggatggtgcgcccaccctgagcatgtggggtcctgtgggcccctactccagcctggaggcagctgcaggggtcagagaccagcctggagccctcgggcaggttactcagcctcagctctcattggtaacccaggtaaaataacagtaatcccatcataaggttgctgtgggcatgaggcttccagccatgcctggcacataggaagctattgtcgtttgtttcactggcttcgcacttgggcagaggccgccgccctctctgctgccttctctacctcaccccccgcccccagcacggtggcactgtggctctggcgcctggtgacttctccctccccggcctcaggtttgcttcactcttccaagggccttcttggtgtgactgtcctgtcctggccacgtccactccaagcagctggtccaggtgtggggcagcccccaagctcagcagaggacagttttgagacttagaggaggacggcatcagatttacatgaagtcagccatctcaagggattaccacgtcaccgcctcctctcacaggtctgagagctggtcccctggagggtgcaggtctcatcctaggtagaacagtcccagcctagcttcaaagtgctcctgctgccagaaagggtagaaaaccatgctgaatgccttcactgttgcctggaatgggagcctcagtttcaccatctgtaaagtgagattaatgaaagggacccacagagggctgttagagccagtaggcggccaggcgcggtggctcacgcctgtaatcccagcactttgggaggctgaggtgggcggatcacgaggtcaggagatcgagaccatcctggctaacacggagaaaccccgtctctactaaaaatacaaaaaattagcctggcgtggtggcgggcacctgtagtcccagctactggggaggctgaggcaggagaatggcgtgaacccgggaggcggagcttgcagtgagccaagattgtgccactgctctctagcctgggcaacagagcaagactccatctcaaaagcaaaagaaaaaagagccagtaggccaggcgctatgtcttacacctgtaatcccagcactttgggaggcctaggcaggcagatcacctgaggtcgggagttcgagaccagcctggccgacacagtgaaactccgtctctactaaaaatacaaaaattagctgggcatggcagcacatgcctgtaatcccagctactcgggaggctaaggcaggagaatcacttgaacacaggaggcagcggttgccgtgagcggagatcacaccattgcactccagccccggggggacagagtgaaattctgtctcaaaaaaaaaaaaaaaaaaaaaaagcaagccagtgggcaaggacacacaccacgcccagcacaccagaagcatgcagcagatgctggctggtagccacagccatggtagtaactggcatcactggcccaagggggtctccctacccaatgtaccagcccagagggtgctaaatgacccatgtttgtgggcatgtgtaccccagtgctgaacctccttctggtagattttcaagcaccattttggagaagggaggcagggaccacagggggccagccagcctgtacaggttttttgtgttttttttgtttgtttgtttgtttgttttttgaggcagggtctcactcttgcccaggctggagtacaggcagtggcgtcatctcggctcactgcagcctcaacctcccaggctgcagcaatcctcccacctcaccttcctgagtagctgggactacaggcacacaccaccaaccctcactattttttgtagagacagtttcaccatgttgcccaggctggtatcaaactcctggactcaggcgatcctcccaccttggcctcccagagtgctgggattacaggcatgagccactgcacctggcctaccagcctgtaaagcttgagggctgggctccaactggagactcacctgcctttcctttctcttcatcagatgtgttccagctgccaagaagccggggccaccattgggtgctgccacaaaggatgcctccacacctaccactacccgtgtgccagcgatg

SEQ ID NO: 610 - DNA, 6650 bp, Homo sapiens
gaaactgtcttctactgactgtttcaaaaccgaggccttcacatccccggaggccctgcagcctggggggactgccctggcgcctaagaagaggagccggaaaggccgggcaggggcccatggactctccaaaggcccgctggagaagcggccctatcttggcccggctctgctcctgactccccgagacagggccagtggcacacaaggggccagtgaggacaactctggtggaggaggcaagaagccaaagatggaggagctgggcctggcctcccagcccccggagggcaggccctgccagccccagacaagggcacagaaacagccaggccacaccaactacagcagctattccaagcggaagcgcctcactcggggccgggccaagaacaccacctcttcaccctgtaaggggcgtgccaagcgacgacgacagcagcaggtgctgcccctggatcccgcagagcctgaaatccgcctcaagtacatttcctcttgcaagcggctgaggtcagacagccggacccccgccttctcacccttcgtgcgggtggagaagcgagacgcgttcaccaccatatgcactgttgtcaactcccctggagatgcgcccaagccccacaggaagccttcctcctctgcctcctcttcctcatcctcgtcctcgttctccttggatgcagccggggcctccctggccacactccctggaggctccatcctgcagccgcggccctccttgcccctctcctccacgatgcacttggggcctgtggtttccaaggccctgagtacctcttgccttgtttgctgcctctgccaaaacccggccaacttcaaggaccttggggacctctgtgggccctactaccctgaacactgcctccccaaaaagaagccaaaactcaaggagaaggtgcggccagaaggcacctgtgaggaggcctcgctgccgcttgagagaacactcaaaggtcccgagtgtgcagctgccgccactgccgggaagccccccaggcctgacggcccagctgacccggccaagcagggcccactgcgcaccagtgcccggggcctgtcccggaggctgcagagctgctactgctgtgatggccgggaggatgggggcgaggaggcagccccagccgacaagggtcgcaaacatgagtgcagcaaggaggctccggcagagcccggcggggaggcccaggagcactgggtgcatgaggcctgtgccgtgtggaccggcggcgtctacctggtggccgggaagctctttgggctgcaggaggccatgaaggtggccgtggacatggtaagaggccagcccagccagggtggggagtgtggggttccaaaggacaggcaggcaggcagtcggggagccccttgtttctagtgctacagtgtgggccaaatgtgtctgcagtctcgggacaatctgcagagtcctgagcctctctggggtgtgtgggggaagtggaggcacccatctggctaaggcaggtcacactcacctaccctgtcccaggagacttcccgccggggcccgtatgcccagccaccgccactctcccactcacctggcatcttcaggctccagccccacccagaatccactgggcccctccccatgctgtcaccggagatgccaaggcccagagaacacgaggactcccaagattgaacatcagggctgccccgggcggtgcaagagcaagttgcccaccctctgttcctgtctccattgcctctgggatgaagctaagggctcaggaagaccctctctggcgacacaggcttggtgcatggacccagtcacagggttcctccctctgcaggacagtccatggggtcacacagtcacaacaggcagggcggggcagatccagaccctctcaccattggctctgagaccagctttggaagccatagtcactgagcaccaacatgagagagggaactctggggctgtgcgccatgcacctttggggctgtgacctgccctctctgtgcctccgtcccctcgcccctaacgtgggtatgagggtgcccatggaggaggggtcgggagggttaaaaggtgggcacctctgagcccaccgagcacagcagccctgtgatagtcagtgcagaggggcctggtggctctggtgacagcagggtgacgttcttcgtggtgtcaccacttccccagtaccatagagtacctctgtgcccttctgagggaggggtcagtgggggcggtggggtgcacctctcccccggggccatgcttctgcccccacattcaaccccgactccactgcctcatccagacttccgtggagtgacgctcccggctctcagcgctgtgtggtggctctcagtggggacgcctgcagccttctctggcccctgccctgagtcccatcccctccactccttccttcaacccactatgtgcggctgaggtcacaggggagccagaggggcttggcaggggtctccagaggccctggacaaacactgcctgcatctgagtgattcagtgacccagcacagtggccccagccggtggcttcgcccctccccctgcccagcctcctcccccgtcgctgcactgcccacctgctcctcgcagtacacccctgcagcccctctgagcagcccctgctcctgacagttgccgtggcattgcctggccaaaccaaggtcccggtgggggcccactgtgtttgccacccacgcctcctagtgtgtgtcttgggcacctgcttcccactgcccatggggatggctggagaccttctccacgcccagacgccctgcccacctcactccaccctccacctcagaggaaggctggccccgacaggactcctgcaggttcctggtgccgcgggccttgcttacccagcagatggtggccttgggcctcttccctctccccttcccagttagtgattttttgcctctctcctgctttctgtctctctctgtctctctctctctctctctctctctctctctctctctctctctctctcattactggctccttcccagcgccttgaaacaggttcaagtctctcccgtcatcaaaaaataataaccctcagatcaccagccccagctggctgccacctcccctgcttcacagccccattcctgaaagccttgtccccacggcatcctcggtcccgcagcctcaccaggggctccccgacactcacgtcccaccaggctgagatcaggtcgtctccacatcccctgcagccagcactggccggccgaagggaggaggggtcagccccgagcaccgaccaccccatcctgtccctggcccatgggtgtcttaaccgcccatgcacacacaaggtcctgctggactgaggagacagtgtgtgttggagaggcgctagcttccctacaccacgcgggggctggaacttgccagcccagcccatgcctgtctgctgtgccatgctccagaaatggcctgacagcctgcgcaactagggctgccccgggaaggtcggaaccaggaacaccctgccagacagatgggacatcctgggagaatgggcagagtctggggcttcccagggtcacttttggctcaccaccccttcctgcctcagtggcttgggggcgccatgctccttggagtgagaccctggttcaaatcccagctctgccgagggctggttccatagctccaggcgagtcacgcatgctctgagaactccacaatgtcaaaccccgttagcaggattgtggggttctgtggatcatgtgggacctgcctggcatgtggaaggggcttggggtgcagctgtgtccctggccccagcactgccacacccctcggtaccttgacctcacttttgcgctctggagggcagaacctctgagccagctctcagggataccttttttcctcgatggccttttctgggaactgccctcgcctgctatctctgagccctgcctgcccttcccccaaagccatcatagacccctacctcctatccagatggagcctggccatggaatgcttggggtgagagggacccatagcgggctccgggcattgttagggggctaggtggtgtctgcagaggccccacctgtggcagggtttacatgccgccacccctgccctcctcttgggtagctggggtcagaagggcctgaggcctcactctctctgcatcttagtttcttcacatctaaaatgctattcatatgcctgcctgagggtggttggggcctccgtgcagtaagtggagagaagccttcagccagaggacccccatatgcttaaacatccagacaccaagggccactcacagacagcagccggcttgtgtttcgtcatcccttttgggtcaggaactggggacgctggactccagatctccaggaggccatcccagactaggcgggaaggaggcctcagccctgagctgaaaacctgaaattctagaataaaccccaggccccactcccagcatgggcagcggggaggggagtgttctgacatttctcagctgctgtggttgggatggtgcgcccaccctgagcatgtggggtcctgtgggcccctactccagcctggaggcagctgcaggggtcagagaccagcctggagccctcgggcaggttactcagcctcagctctcattggtaacccaggtaaaataacagtaatcccatcataaggttgctgtgggcatgaggcttccagccatgcctggcacataggaagctattgtcgtttgtttcactggcttcgcacttgggcagaggccgccgccctctctgctgccttctctacctcaccccccgcccccagcacggtggcactgtggctctggcgcctggtgacttctccctccccggcctcaggtttgcttcactcttccaagggccttcttggtgtgactgtcctgtcctggccacgtccactccaagcagctggtccaggtgtggggcagcccccaagctcagcagaggacagttttgagacttagaggaggacggcatcagatttacatgaagtcagccatctcaagggattaccacgtcaccgcctcctctcacaggtctgagagctggtcccctggagggtgcaggtctcatcctaggtagaacagtcccagcctagcttcaaagtgctcctgctgccagaaagggtagaaaaccatgctgaatgccttcactgttgcctggaatgggagcctcagtttcaccatctgtaaagtgagattaatgaaagggacccacagagggctgttagagccagtaggcggccaggcgcggtggctcacgcctgtaatcccagcactttgggaggctgaggtgggcggatcacgaggtcaggagatcgagaccatcctggctaacacggagaaaccccgtctctactaaaaatacaaaaaattagcctggcgtggtggcgggcacctgtagtcccagctactggggaggctgaggcaggagaatggcgtgaacccgggaggcggagcttgcagtgagccaagattgtgccactgctctctagcctgggcaacagagcaagactccatctcaaaagcaaaagaaaaaagagccagtaggccaggcgctatgtcttacacctgtaatcccagcactttgggaggcctaggcaggcagatcacctgaggtcgggagttcgagaccagcctggccgacacagtgaaactccgtctctactaaaaatacaaaaattagctgggcatggcagcacatgcctgtaatcccagctactcgggaggctaaggcaggagaatcacttgaacacaggaggcagcggttgccgtgagcggagatcacaccattgcactccagccccggggggacagagtgaaattctgtctcaaaaaaaaaaaaaaaaaaaaaaagcaagccagtgggcaaggacacacaccacgcccagcacaccagaagcatgcagcagatgctggctggtagccacagccatggtagtaactggcatcactggcccaagggggtctccctacccaatgtaccagcccagagggtgctaaatgacccatgtttgtgggcatgtgtaccccagtgctgaacctccttctggtagattttcaagcaccattttggagaagggaggcagggaccacagggggccagccagcctgtacaggttttttgtgttttttttgtttgtttgtttgtttgttttttgaggcagggtctcactcttgcccaggctggagtacaggcagtggcgtcatctcggctcactgcagcctcaacctcccaggctgcagcaatcctcccacctcaccttcctgagtagctgggactacaggcacacaccaccaaccctcactattttttgtagagacagtttcaccatgttgcccaggctggtatcaaactcctggactcaggcgatcctcccaccttggcctcccagagtgctgggattacaggcatgagccactgcacctggcctaccagcctgtaaagcttgagggctgggctccaactggagactcacctgcctttcctttctcttcatcagatgtgttccagctgccaagaagccggggccaccattgggtgctgccacaaaggatgcctccacacctaccactacccgtgtgccagcgatg

SEQ ID NO: 611 - DNA, 460 bp, Homo sapiens
aggctggagtgcagtggtgcgatcttggctcactgcaacctccgcctcccgagttcaagcgattctcctgcctcagcctctcaagtagctgggactacaggcgtgcaccaccacgctcagctaatttttgtattttttgtagagatggggtttcactgctttggacaggatggtctccatctcttgacctcgtgatccgcccgcctcagctgcctaaagtgctgggattacaggcgtgagccactgtgcccggcccctagtagcgtttttaatgtgtggtcttgagcaagttggttgatacctctgcacacagtttccctacctgtatgatggagatgataatagccccttctctgcagagctgctgggaggagagtgaaataatgaacactacccacacggtgctgcctcagtcctattttgggtccagcctctgtgacctctccccacacggtgctgc

SEQ ID NO: 612 - DNA, 400 bp, Homo sapiens
accctcttcaagaggatgtcttctcccaagaaagccaagcccaccaagggcaatggcgagcctgccacaaagctcccacccccggagacccccgatgcctgcctcaagctcgcctctcgggcagccttccagggggccatgaagaccaaggtgctgccaccccggaagggccggggcctgaagctggaagccatcgtgcagaagatcacctcgcccagcctcaagaagttcgcatgtaaagcgccaggggcctctcctggtaatcctctgagcccatccctttccgacaaagaccgtgggctcaagggtgctgggggcagcccagtgggggtggaagaaggcctggtaaatgtgggcaccgggcagaagctcccaacttctggggctgatccgttatgca

SEQ ID NO: 613 - DNA, 400 bp, Homo sapiens; identical to SEQ ID NO: 612

SEQ ID NO: 614 - DNA, 460 bp, Homo sapiens; identical to SEQ ID NO: 611

SEQ ID NO: 615 - DNA, 518 bp, Homo sapiens
atgatttttaaacagatttggcacaggagtgcctttctgggtttagggaagtggtggacaaggcaggagagaaccacattcatcttctcctcttgtgtttgtcttctgtctttcaataacgtccatgaactgtgaggttagtgtcttggctgagagataagtatggcttggcattgattcttctgttgttacctcaagctgttttctagtccccaagaacagcactctcagtgggtgtggaagtgggcgggacatgaagcaatggttttacattgcattgcctggctacagcttggcatttctttcctttttctttttctttgcgtcattgccattggtgccactaattttgcttcccctctcttttataacttgtttcttcgggagttgcctagagtctctgcattatatcttatttggtattgaggcagtgtgttcttggccaataacctaggagatgatatctgttcatcttacaggtttagtgctggaggaattcattaaaaataataataaaa

SEQ ID NO: 616 - DNA, 3598 bp, Homo sapiens
atggggcggccctggccagaagcggaggaggtggcacccgggaccgagctggggtcttggaggaagagagggtgaggggaatacagtactgggggtgagagaagggttggacagaagagggtcgggtatctgggcatgcgcagggccgcaggactcttggtggggtagcgagggggacggtcccacgactgctccgaagggccgggactcccagtgggggcgggacccccggagtgcccgcctgcggactcccaagcctggagcctggggagagggtgggcacctccgttcccgcacacccgtccatggtgtgtgcgccgagcgtccaggagccacggcggtgtcttccttgcgcgtcttttacacgtgtgggggtaggctgctcctcggggctgagccgtggccagggttatggagaggcccgcctctccccagatggcgtcgtcgagccctgactccccatgttcctgcgactgctttgtctccgtgcccccggcctcagccatcccggctgtgatctttgccaagaactcggaccgaccccgggacgaggtgcaggaggtggtgtttgtccccgcaggcactcacactcctgggagccggctccaggtgggttagactttatggggtgctgggaggtgtggcagatctctgcattcttttaagaccttcttccctgctccccacacctgggaggctgccagaagtagtggaagagcatgagctttaggtctaccaacctggacctgagctcattatgtagcctcagtctacctcagtttcctcttctgtaaaatgggaatgagaccttcctcaaagggatctataaggtaattggcagagtgccacactcgaggggccgcccctctatgagtggacgcttcctttctcctccctcacctccagtgcacctacattgaagtggaacaggtgtcgaagacgcacgctgtgattctgagccgtccttcttggctatggggggctgagatgggcgccaacgagcatggtgtctgcattggcaacgaggctgtgtggacgaaggagccagttggggagggggaagccctgctgggcatggacctactcaggtgcagaccctgcccttcctcatctgcctgacacaccagaaatctaggggctgagttttgacctgggcccatccatccctcccccagcctggttcacaggggcctcctcctctctgcagactttgcccttgtgccttcgtgaagaaggctgcagcagcagccacctttgggcctctcctggcccagaaatagagcagtggttatttatttattttcagttgaaatcttacatagagtcccaatttataaaaccagtaatagtggatggagcagctctgggtggagagaggttaggggctcaggacacttctctctctgaaactgtgtttcaggccttttcatggaaccctcaaagcatagcacatggaaccagagcattgaaagccactggcataattgcatttgatacgatcagtgccagcagatttgctgtgtgacttgggcctatcaccaaacctctccgggcctcttctgtcccctggagcttctgccaccagccattgatccctctgtcacccttctgtcccttggccctctcttttgccaggctggctttggaacggagcagctctgcccaggaggccttgcatgtgatcacagggttactggagcactatgggcaggggggcaactgcctggaggatgctgcgccattctcctaccatagcaccttcctgctggctgaccgcactgaggcgtgggtgctggagacagctgggaggctctgggctgcacagaggatccagggtgaggtgttccctttctcccagctttgggaagtgggagagatggtaggggcagggaggggcccgatccaggtgcaagcctgtcaggacatccagggagatgggagatgagcccacttgggaattctcctccccttcacttggttaagtcttccgtgtgctacagcctgttgcttcctctgggaagccttcctggacttccctgggtggtcaggtttcctgcttatatgcaagcaggtacttctttttcatcgcattcaacacagttgcatgcttacatttatctctgtgattattttgtctgcctcccccaccaaaacgtaggctccatgagggtaggtagttctcttctccaccatgttctcagcacctcgcccagtgcctggcatagaatagatgctcaatggtaaatgaaccactccccgatctcctccacagagggggcccgcaacatctccaaccagctgagcattggcacggacatctcggcccaacacccggagctgcggactcatgcccaggccaagggctggtgggatgggcagggtgcctttgactttgctcagatcttctccctgacccagcagcctgtgcgcatggaggctgccaaggcccgcttccaggcagggcgggagctgctgcggcaacggcaaggttagtgaacggtggagggggctgggggccaggagggccacagcagtgccagccactctcccctcccacagcttccccctctactccttggcagggggcatcacggcagaggtgatgatgggcatcctcagagacaaggagagtggtatctgtatggactcgggaggctttcgcaccacggccagcatggtgtctgtcctgccccaggatcccacgcagccctgcgtgcactttcttaccgccacgccagacccatccaggtgggaagaatgagggtggggaaggctggggagaagagaggatctgatatatctccgtgcttccatctgtgcccctctaggtctgtgttcaaacctttcatcttcgggatgggggtggcccaggccccccaggtgctgtcccccacttttggagcacaagaccctgttcggaccctgccccgattccagactcaggtagatcgtcggcataccctctaccgtggacaccaggcagccctggggctgatggagagagatcaggtatcccccagggagtaggggctaccttgaggggatgatagacctcccccactcccagtgggactctggaaatatgaaggaactagggagtggaagagatttcagagctggggagaggagttcctcccttcaaagccagcaactgcctttggggaatgtcggggggtatctcctttctcctgcttgtgtgaggtggtacacagtccccccttcacctggcgggaagcctgtcccggacagactcatctcagctttcccttggggcaggatcgggggcagcagctccagcagaaacagcaggatctggagcaggaaggcctcgaggccacacaggggctgctggccggcgagtgggccccacccctctgggagctgggcagcctcttccaggccttcgtgaagagggagagccaggcttatgcgtaagcttcatagcttctgctggcctggggtggacccaggacccctggggcctgggtgccctgagtggtggtaaagtggagcaatcccttcacgctccttggccatgttctgagcggccagcttggcctttgccttaataaatgtgctttattttctcttcagtgaa

SEQ ID NO: 617 - DNA, 5689 bp, Homo sapiens
tttagaatcaggtggctcactgagctctgtattttgtttcctggagctttcactggtttcttcccctgagataccccaagtgacatgaaaagcatactcagggcctagagacactttactggggatgggcttctgtcacaggtcagaggtctgagaagaggggcaggccccactcctctccactagtagagaaaggttgacagagaatcatttcttgcttctcttggccgtagttttggttgtgctgggggcctcagccacagaggccttgggggctgtggctgctcgtgcccccttccttccccagaaagagctttggtggcccctgggaatcagactgcatggtttcttggtgggagaggaggcctggggtgaggagacggcctcagggactgtctcctccccttgcgcaggagtggcagaagggctgctgtccccagccatgggcaccccaggtagcaggggcaggtcggtgagggtgggctgcatctccatcctcagcaggtgctctgtcagggccgtctgttgccggtgctccctgtgcctgctcagctcctgctccagctccttgaggaagcctgggaggggccgggggtggagggtacagggtgggtggagccctgggctcagcaggagggtccctgggctcagggaagtctctggctggccccttgtcccttgtgggaaggagcctgaggctggggcccaggactgacacctggctctggcccagatgttgatctgaacttggggctcccctccccggacgccactgccaccttagcttccctcatgtcccacagggcagaggtgggctctggggaggctgaaaaccttggaaagcagggtcacctcgttctgagcagaatgggccactcagctctgggaactcctcatcgcttgaggcttcatcctcctcatccgaaatccagcgctccaccacaggctgcccgtccaggtccaggagaagtggcagggcttctgtcaccagctcgctgcagagcagaaggagcagaggttacccaggagggcaccctggcgtggaggatgcaaagacacgcaccacagcactcacacccggaggggtggtggctcatgagctaggtaggaggtgggggagaaggtgtcatggacaggaccccaggtttgcaggctgagaggggtctgggctgagttagcaggtagagctcagccatgacctttcttcccaccctccactccttaccggtagccatcctggttggtgcagctgtttccagacaggttgaggatgagaaggctctgggggaactcatctgcacacagcaaagagagaggaaatggggttctcacttgatcttagccaaaagaccatgaagcgatgggaatggggttctcatacccactttctagtccaaagccagtacctctaggcacaaccccttgaactccctgaggatgaaatgtggacctgcaggggcatggctaatagaagcatgggcagatgggtgcagaggggagggcaggccccacaggggatgtgtttggtgagccagggcgagtgggttcctacccagcttcaatgtttctatcaggttctcagaaaggtccagaaactggaggcatgggaggtcgaggaggttttccacctgcctgatttggtttcctgccagagacaggaagctgtaggggaaggaaggggtacagaggcagagctgaatcatggaacagctggaagaaaagaggagggcacctgacaccggggcccctgggctaggcagctgatgaccagtggggacacatggccttctggggtgagggagtagatctaggcttgctggtccttgactgacaaggacccaggcttggagaaatctgaaccagttctttgggatatggctaggttcccccaacccctcttcccctgcctgagccctggcaccacataccgcaaggaggggatgcaagccaggttctcaatttgctggatcttattctgcaagaagaaaccgaagtggggaaaccaagctgagatcagatgcgtcaggggccctttacggggacaaagccccaagaccatgtctactctgcagctggagatctggcactttgggaatgatcaccccactccttgaacaggttgccactaccttaagaaagatgattttctttccccatgtggatggttaagggtgtaaacctggggtatctaaacctgactacgtatactcttctgattccacaaccaaagagtgacctgggaatcagaaaaggaaactaagaagccaccaggaaaacggaaagggccttggtggtggcttgcatacacagagagaacaatgagcatacaggaacttgacggttaaagtttctatggggaaagttgaagcgagctgggaatactcaaccaggggaaggctgaagatcaaccaaccaccaccaccaccaccaaacagccttcaagtaggatctgaatgatgtacaggaatcttcatagtttcctcttcttcaaaacaggaaatgggctggagctatttaacgtgaaagatttagagtagatgccaaaaagaacttctagatcaagagaagtgcctaaagaacagtggaaggagcacaggtcatgttcaggatctattttgagggaattagtttttcaattcaggaccctatgtcattcgtctgggaatggtttaaatgaaggtctgcctgcctgaacaccagggaatgggcaggatgacctggttggctcctttcagatgagacagattaggtccacaggggtcaaggggaggggaagggtggagaaagaagttaccccttgcagatagagactgtgaagattctggaggccttctaagttcctgatagtagtaatcccctcccggtccaggcggacagtctgcagttcatcaagagtgtgaaacctgggaaaagagtcagtaagggtggtgttagagcaccactcatgtggtctcttagcagggaggatgggagacggaggagggaaggggtttcaaggaggggtagttggctgagtcattttaatcagatgtgagaaacatcttgacatcttgaggtggtgtctagatcatgaaaccggcttgacttgcagactcgtatctctattgttagcactgggaagggtgagagagaggagtaagggccctctgggaaattgggggatggcagcttatggtttctggagagattcagaggcaagagaaaccttcctctggccagcttggatggtggaggcaggggtgggacagagatgagacactgcagaaagatccttcctcaccttccttttgagtcgttcatggagaaaaaagcacttgttccatccacccattcattcattccacaacattgctgagtgcctactagagacaaatgacagagtctctgcccaccactaataaagaagcagggcaggctgaccatggtggcttaccctgtactcccagcactttgggaggccgaggcaggaggatcgctcgagcccaggaggtcgaggctgcagtgtgccatgattatgccactgcacttcagcctgggtgacagagcaagaccctatgtcataaaaaaaaaaaaaaaagaggctgggcgaggtggctcactgtaatcccagcactttgggaggtcgaggtgggtggattgcctgaggtcaggagttcaagaccagcctggctaacatggtgaaaccccatctctactaaaaatacaaaaaaaattagccgggtgtggtggcgcacacctgtagtcccagctactcgggaggctgaggctggagaatcgcttcaactcaggaggcagacgttgcagtgagccgagatcacaccattgcactccagcctgcgcaacagagtgagactccgtctcaaaaaaaaaaaaaaaaaataggaagaaggccaaacatctatgacaagtggataacagaggcaagtacaggggaaaggaagaaggaggaggaagaagggaaagaaggaggaagaggaagaagaaagaaagaaagaaagaataaggccaaacatccctgacaagtggataacagaagcaagtacaggggacaaagggagtacataggctgtgcactaaattcacagtaggaggaatcagggaatgcttcctagaggaggtgacagatgagtaggcattagccatgaaggtggggggatatggggagaaggcatttcaagcagaaggaatagtacatgctaatacagcccttccgaaactccaatatgcccatgcagattctaattcagtagatcgggtggaggggctgagatgctccacttctaacaagccccctgtgatgccaatgctgctgtcctacccctgcaccccctcccatccacacatactctgagtagtaaggtactaaggtgtgagtacacagtgtgggaaattgtacacttgtggagagtggccagaaataaggctgaaaagcagaagtcaactcatgcttaggcattgggatttatttgggaggaagtttctatcagtgaatgcctgattagatttgttatttaaaaggatcactttggctactcaggaggctgaagtgggaggattgtttgaggagttcaagaccagtctggccaacagagcaagaccccatctctaaaaaagtaattaaaaatactttactttttgtttgttttagaaatagggtctcaccctgttgcccaggctggcatgcaatggcatgatcatagcttactgcagccacaggtacctgggttcaagtgatcctcctgtctcagccacctaggactacaggtgtgcaccaccatgctcagctagtttatttttattttttagagataggattctgtctctattgcccaggctggtctcaaactcctgggctcaagtgatcctcctgcctcagcctcccaaagtggtgggtgtgtaggagagaggtgaacacggccttatctaagacagttgagtgaggatggtgaaaaagaaatggaattattttgaagaagggaaaatcagctgggcattaccactgattgaatgtgtggagtaaggagagaaacaaagatcagttgacaaatcagtacacgtcagggacctggtcatcctgagtgtttcagccttctagcaccccttttctcccccatgcactcacatcttctctgacagttccccatcttcagggaaagtcaagttccgcttagtgataagggcttcagtgatgcagacgcccccttcctctggaccctgggctgacttccctgtgaaaagatgagtccaactgtgacacttcctcactcttggaggccttaccccgctgttttccaactgctctacccaccgtcccacctccctactcacctccagacatgatctaaaataaaaggctgctggtctgaggcgggagaggaacgaaaagagaggtcttggcggcccctaaggatggcagaactcaggatggcaggaggagagagaaactcagagacttaggagaggaggaaagggggttgattcagagaaaattgctggggtgaggtcgaagaaaacagtaaattgatgtgaagggtctggagtttgaggggtgtggaggggctttgctggcagcaagctggggtgttgtgggcaggaatggttgagaaaggagcagttcctaggaagccggagtcgttgctaagagactggacgccgagtggggaggtaaaggcgggctccgttggcccgg

SEQ ID NO: 618 - DNA, 776 bp, Homo sapiens
  misc_feature (709)..(709): n equals a,t,g, or c
  misc_feature (738)..(738): n equals a,t,g, or c
tacaacgtcgtgactgggaaaaccctggcgttacccaacttaatcgccttgcagcacatccccctttcgccagctggcgtaatagcgaagaggcccgcaccgatcgcccttcccaacagttgcgcagcctgaatggcgaatggcgcctgatgcggtattttctccttacgcatctgtgcggtatttcacaccgcatatggtgcactctcagtacaatctgctctgatgccgcatagttaagccagccccgacacccgccaacacccgctgacgcgccctgacgggcttgactgctcccggcatccgcttacagacaagctgtgaccgtctccgggagctgcatgtgtcagaggttttcaccgtcatcaccgaaacgcgcgagacgaaagggcctcgtgatacgcctatttttataggttaatgtcatgataataatggtttcttagacgtcaggtggcacttttcggggaaatgtgcgcggaacccctatttgtttatttttctaaatacattcaaatatgtatccgctcatgagacaataaccctgataaatgcttcaataatattgccaaaggaagagtatgagtattcaacatttccgtgtcgcccttattccctttattgcggcattgagcctgtctgtttttgctcacccagaaacgctggtgaaagtaaaagatgctgaagatcagttgggtgcacgagtggngtacatcgaactggatctcaacagcggtnagatcctcgagaggtttcgcccccgaagaacgtttttc

SEQ ID NO: 619 - DNA, 878 bp, Homo sapiens
  misc_feature (741)..(741): n equals a,t,g, or c
gaaaaccctggcgttacccaacttaatcgccttgcagcacatccccctttcgccagctggcgtaatagcgaagaggcccgcaccgatcgcccttcccaacagttgcgcagcctgaatggcgaatggcgcctgatgcggtattttctccttacgcatctgtgcggtatttcacaccgcatatggtgcactctcagtacaatctgctctgatgccgcatagttaagccagccccgacacccgccaacacccgctgacgcgccctgacgggcttgtctgctcccggcatccgcttacagacaagctgtgaccgtctccgggagctgcatgtgtcagaggttttcaccgtcatcaccgaaacgcgcgagacgaaagggcctcgtgatacgcctatttttataggttaatgtcatgataataatggtttcttagacgtcaggtggcacttttcggggaaatgtgcgcggaacccctatttgtttatttttctaaatacattcaaatatgtatccgctcatgagacaataaccctgataaatgcttcaataatattgaaaaaggaagagtatgagtattcaacatttccgtgtcgcccttattcccttttttgcggcattttgccttcctgtttttgctcacccagaaaacgctgtgaaaagtaaagatgctgaagatcagttgggtgcacgagtgggttacatcgaactggatctcaacagcggtaaaaaccttgagagttttcgnccccgagaacgtttttcaatgatgagcacttttaaagttctgctatgtggcgcggtattaatccctatttacgcccgggcagaagcactcggtcgccggatacactattctagaatgacttggttgagtactaacca

SEQ ID NO: 620 - DNA, 150 bp, Homo sapiens
cgtcgtgactgggaaaaccctggcgttacccaacttaatcgccttgcagcacatccccctttcgccagctggcgtaatagcgaagaggcccgcaccgatcgcccttcccaacagttgcgcagcctgaatggcgaatggcgcctgatgcgg

SEQ ID NO: 621 - DNA, 1299 bp, Homo sapiens
ttttttttttttttggcaaataaagagtaaaacaggctatttaaaacatccatttaaatgcaaattttgatatcccaagagaaaaatgttaatcatttaaatagacaggattatcgcccacccttaccacttccctcctctcccaagttttagaaaacgtagccttagcccacacaagtcaagtcagccaggagtccttacatcttaagaactcccactcagatgagagggctgaggcagatagagggggacttttccttcttttgaggaaggagatggaaaagagagaaaatagtctaacatatcctataagccaggcatggggcaatattataaatacaaacacacacacacacacacacacatgcatgcacacacacacacccacacttaatcatcacaactgtcttggaacggggaattatcatcctcatctacagacaaggaaactgaggcttagaaaggtgaagcagtttgccccactggtaggtgacccagttgggagtagaggcctccatagccctcccagtccatggtgacctgcggtcctgtccagactcacccagcatccccatgccaagcatgaacgcgtccatggtgtaaggcagtccccgggcccggcctcttgtcccaggtgggaacatgacttctttcggctgagctttcttacattctacctgttaaacagaaaggcgaacaaatgagatgcaaatgaattccacgtaaatgtcaaatgcagaacctgtctggttatgagctaagttatttttagccttgctccttacccactgtaaaaatagccatgccgagtaaatggcctgcaaaataaatacttaagaaaacacgccacttgtgcaaatcctgcttcggaaaaacctacaaggatgaaactgggttctggaggggtggcaaggacgtaagctgcagatatacacacagattgaagctcaggctgacgctcgtgcagaaagcatgacagataaggaggcagacaatggctgttggatgtgtctgtgaataataacaacaatagcaataataataatccctcaggatttttcagccctttacacatttacaaatgcccctgacattctctcaggccagtgactcttcatgccaggccatctgattcaaactcttattaaacagacagaccacttagccttagctccagttcacagatgagaaaacagagcatcagaagttttgtgttggctgggcgtgggggatcatgtttgtaatcccagcactgtgggaggtggaggcaggtgaatcagcttgagcccaggcgtttca

SEQ ID NO: 622 - DNA, 330 bp, Homo sapiens
tttttaaaaacattttctcatttattctcacttgtttcttcttccagggataagttttagaaacatctggccaatttaaaaaaattacaataggatttctctttgaaactctgttaagcctaaaaaattcatatgaggagaattaacatcatggccatttttaatattctcctggcatctttttctatttcataaagttcctcaaaatagttttacctgcccttgttatttcctcagacaagtagatacaattctttgtcagaccacaagatgttttataaatttaaaattaagccagaagtgatttaaacagcagcaaatctgaaaata

SEQ ID NO: 623 - DNA, 3328 bp, Homo sapiens
ttgttttgtctcaggttttttttttcttttttttttttgagagggtgtctcgctctgttgacaggctggagtacagtagcacgatctcaggccactgcaacctctaccttctgggttcaagagattctcctgcctcagcctcccaagtagctgggactataggcgcatgccaccacgcccagctaatttttgtatttttagtagagacagggtttcaccattgttggccaagctggtctcgatctctttgaccttgtgatccacccaccttggcctcccaaagtcctgggattacaggcgtgagccactgtgcccagcctggctcaggtttttcaatacagtcttgaccttggcattcagtatcctcacagcatggttctaattaactttctagctctatttcccttttcctgctccctctctctacaactagtctttctctgattgccccgccctcaacccatctaaactagaccccagggaagcaccttggtccccttcctctctcccactcaccatccaaccaatcaccagagcctgtacattctatattttcaacatcgattcaattgtctacttctttctagcctgccctctctgactgggactccttgagccagcctgatcaccccaatccatccctcacactgtgcccatctttctgaagtaggaatctgatcacaccaccctgctaaaaacactctggttctccccacggcatgtggtgcccttgtatagctggcaaagccttgcatggcacggccccagcctgtgcttcaactcaattgcccgactctctccagctctgctgagccacctaagtcacagatggtttctcctctcatctctgctctcttccatgtgccatttctgtggcttggaatgttcttccctcattctctttctggccctttcccgtcacaccttagacgtgcatcttcctctcgaaaacctctagtgaagcctcccagggccaggcagtaccctcctctggcttcttctggatacagaggaagaatctgagcatcgattctccatctcagcaggcctctgtgtgcctgctgactccgactagaccagagatccgtaaggacagggatcgagttttttttcttttaattcactgcctcaaaaatcctctgtgcattacctattcatcctcttctctcccttaacctgaaccagtgatcttactgtctccatcattgtttttttcttttcttttcttttcttttttttttttgaggtggagtctggctcttcacccaggctggagtgcagtgatgcgatctcgactcactgcaacctccatctcctgggttcaagcgattctcctgcctcagcctccccagtagctgggattacaggcatgcgctaccatccccaactaatttttgcctccataattttgccttttctagaatgtcatacaggtggaattactcagtatgctgcctttttcagattggcttctttcacttagtaatatgtttgttttttgagacagggtcttgctctgtcgcccaggctagagtgtggtggtgcgatcttagctcactgaaacctccacctcccaggttcaagtgactctcctgcctcagcctcccgagtagctgggactacaggcacatgccaccatacccggctaatttgtggatttttagtacagacggggtttcatcatgttggccagggtgttgttgaattcctgacctcaagtgatccacctgcctcagcctcccaaagtgttgcgattacaggtgtgagccactgcgccaagcctcatttagtaatatgcatttaaactttctccatgtctttaatggcttgatagctcatttatttttatcatggaatatttcattgtctggatggaccacagtttatttctccattcacctactgaaggacatctcggttgcttctaagttttggcaattatgaataaagctgctataaccatcaagtgcaggtttttgtgtggacctattatcaactaattcgggtaaatctcaaggagtgcaattgctggatcacacagtaagagtgtgtttagttttaagtggctgtgccattttgcattcccaccagcaatgaatgagagtttctgttgctccacattctcactaccattcggtgttgtcagtgttttgcattttggccattctagtaggtgtttacatggtatctagtcatttgaatgggcatatgatgtggaacatctttttttttttaattttattattattatactttaagttttagggtacatgtgcacaacgtgcaggtttgttacatatgtatacatgtgccatgttggtgtgctgcacccattaactagtcatttagcattaggtatatctcctaatgctattggaacatcttttcatgtgtttatttgccatctgtatatcttccctgatgagttggggatgcattctttccatctcagagtccccagaaactaacatagcagttggtacagagttggtgctcaacaaacatcagcttaggaactatgtcctatgtttttttgtttttttttttttttaaaaaggaatgtgagctgttcccaaaacgtatgtccttcccccatgcctctaccctgcccttccacaaactttctgatcttcagcacacactacccaaccatcaaggctgagacttcccgtggccagcagtgtctcatgctggcttcaagccccacagcactgcttttttcaacttctcttgtggtttagactgtctttagcccagcaagagaattcattgtcttatcccccattaaactgtacctacactctttgaggaaaagggtccatcttacttaaaatattttaaaaattcacatgtgataaaactgatgtgtatgtgtatgagagagagagaaagagagaacagttctatgaggcttaatgtatacatgtggctgtgcagcccactgccccatgtcaccattttcaattctgtcattacccctgggacaatgtcttgtcaatatacacttgaggctgggcggggtggttcctgcctgtaatcccacctgtaatcaggagttcaagaccagcctggccaacacagcaaaaccccgtctctactaaaaatacaaaaatttgctgggcgtggtggcacgggcctgtaatcccagctactcaggtggctgaggcaggacaatcgcttgaaccggggaggtggaggttgcagtgagccaagatcgtgccactgcactccagcctaggcaacagagcgagactctgtctcaaaaatacatacatacacacacacatacacacacacgcgcaagagacacagtgagtagaaacaccga

SEQ ID NO: 624 - DNA, 3051 bp, Homo sapiens
tttttttttttgagagggtgtctcgctctgttgacaggctggagtacagtagcacgatctcaggccactgcaacctctaccttctgggttcaagagattctcctgcctcagcctcccaagtagctgggactataggcgcatgccaccacgcccagctaatttttgtatttttagtagagacagggtttcaccattgttggccaagctggtctcgatctctttgaccttgtgatccacccaccttggcctcccaaagtcctgggattacaggcgtgagccactgtgcccagcctcggctcaggtttttcaatacagtcttgaccttggcattcagtatcctcacagcatggttctaattaactttctagctctatttcccttttcctgctccctctctctacaactagtctttctctgattgccccgccctcaacccatctaaactagaccccagggaagcaccttggtccccttcctctctcccactcaccatccaaccaatcaccagagcctgtacattctatattttcaacatcgattcaattgtctacttctttctagcctgccctctctgactgggactccttgagccagcctgatcaccccaatccatccctcacactgtgcccatctttctgaagtaggaatctgatcacaccaccctgctaaaaacactctggttctccccacggcatgtggtgcccttgtatagctggcaaagccttgcatggcacggccccagcctgtgcttcaactcaattgcccgactctctccagctctgctgagccacctaagtcacagatggtttctcctctcatctctgctctcttccatgtgccatttctgtggcttggaatgttcttccctcattctctttctggccctttcccgtcacaccttagacgtgcatcttcctctcgaaaacctctagtgaagcctcccagggccaggcagtaccctcctctggcttcttctggatacagaggaagaatctgagcatcgattctccatctcagcaggcctctgtgtgcctgctgactccgactagaccagagatccgtaaggacagggatcgagttttttttcttttaattcactgcctcaaaaatcctctgtgcattacctattcatcctcttctctcccttaacctgaaccagtgatcttactgtctccatcattgtttttttcttttcttttcttttcttttttttttttgaggtggagtctggctcttcacccaggctggagtgcagtgatgcgatctcgactcactgcaacctccatctcctgggttcaagcgattctcctgcctcagcctccccagtagctgggattacaggcatgcgctaccatccccaactaatttttgcctccataattttgccttttctagaatgtcatacaggtggaattactcagtatgctgcctttttcagattggcttctttcacttagtaatatgtttgttttttgagacagggtcttgctctgtcgcccaggctagagtgtggtggtgcgatcttagctcactgaaacctccacctcccaggttcaagtgactctcctgcctcagcctcccgagtagctgggactacaggcacgtgccaccatacccggctaatttgtggatttttagtacagacggggtttcgtcatgttggccagggtgttgttgaattcctgacctcaagtgatccacctgcctcagcctcccaaagtgttgcgattacaggtgtgagccactgcgccaagcctcatttagtaatatgcatttaaactttctccatgtctttaatggcttgatagctcatttatttttatcatggaatatttcattgtctggatggaccacagtttatttctccattcacctactgaaggacatctcggttgcttctaagttttggcaattatgaataaagctgctataaccatcaagtgcaggtttttgtgtggacctattatcaactaattcgggtaaatctcaaggagtgcaattgctggatcacacagtaagagtgtgtttagttttaagtggctgtgccattttgcattcccaccagcaatgaatgagagtttctgttgctccacattctcactaccattcggtgttgtcagtgttttgcattttggccattctagtaggtgtttacatggtatctagtcatttgaatgggcatatgatgtggaacatctttttttttttaattttattattattatactttaagttttagggtacatgtgcacaacgtgcaggtttgttacatatgtatacatgtgccatgttggtgtgctgcacccattaactagtcatttagcattaggtatatctcctaatgctattggaacatcttttcatgtgtttatttgccatctgtatatcttccctgatgagttggggatgcattctttccatctcagagtccccagaaactaacatagcagttggtacagagttggtgctcaacaaacatcagcttaggaactatgtcctatgtttttttgtttttttttttttttaaaaaggaatgtgagctgttcccaaaacgtatgtccttcccccatgcctctaccctgcccttccacaaactttctgatcttcagcacacactacccaaccatcaaggctgagacttcccgtggccagcagtgtctcatgctggcttcaagccccacagcactgcttttttcaacttctcttgtggtttagactgtctttagcccagcaagagaattcattgtcttatcccccattaaactgtacctacactctttgaggaaaagggtccatcttacttaaaatattttaaaaattcacatgtgataaaactgatgtgtatgtgtatgagagagagagaaagagagaacagttctatgaggcttaatgtatacatgtggccgtgcagcccactgccccatgtcaccattttcaattctgtcattacccctgggacaatgtcttgtcaatatacacttgaggctgggcggggtggttcctgcctgtaatcccacctgtaatcaggagttcaagaccagcctggccaac

SEQ ID NO: 625 - DNA, 3029 bp, Homo sapiens
  misc_feature (1)..(1): n equals a,t,g, or c
  misc_feature (4)..(4): n equals a,t,g, or c
  misc_feature (150)..(150): n equals a,t,g, or c
ntancccattgtgcccagcctggctcaggtttttcaatacagtcttgaccttggcattcagtatcctcacagcatggttctaattaactttctagctctatttcccttttcctgctccctctctctacaactagtctttctctgattgcnccgccctcaacccatctaaactagaccccagggaagcaccttggtccccttcctctctcccactcaccatccaaccaatcaccagagcctgtacattctatattttcaacatcgattcaattgtctacttctttctagcctgccctctctgactgggactccttgagccagcctgatcaccccaatccatccctcacactgtgcccatctttctgaagtaggaatctgatcacaccaccctgctaaaaacactctggttctccccacggcatgtggtgcccttgtatagctggcaaagccttgcatggcacggccccagcctgtgcttcaactcaattgcccgactctctccagctctgctgagccacctaagtcacagatggtttctcctctcatctctgctctcttccatgtgccatttctgtggcttggaatgttcttccctcattctctttctggccctttcccgtcacaccttagacgtgcatcttcctctcgaaaacctctagtgaagcctcccagggccaggcagtaccctcctctggcttcttctggatacagaggaagaatctgagcatcgattctccatctcagcaggcctctgtgtgcctgctgactccgactagaccagagatccgtaaggacagggatcgagttttttttcttttaattcactgcctcaaaaatcctctgtgcattacctattcatcctcttctctcccttaacctgaaccagtgatcttactgtctccatcattgtttttttcttttcttttcttttcttttttttttttgaggtggagtctggctcttcacccaggctggagtgcagtgatgcgatctcgactcactgcaacctccatctcctgggttcaagcgattctcctgcctcagcctccccagtagctgggattacaggcatgcgctaccatccccaactaatttttgcctccataattttgccttttctagaatgtcatacaggtggaattactcagtatgctgcctttttcagattggcttctttcacttagtaatatgtttgttttttgagacagggtcttgctctgtcgcccaggctagagtgtggtggtgcgatcttagctcactgaaacctccacctcccaggttcaagtgactctcctgcctcagcctcccgagtagctgggactacaggcacatgccaccatacccggctaatttgtggatttttagtacagacggggtttcatcatgttggccagggtgttgttgaattcctgacctcaagtgatccacctgcctcagcctcccaaagtgttgcgattacaggtgtgagccactgcgccaagcctcatttagtaatatgcatttaaactttctccatgtctttaatggcttgatagctcatttatttttatcatggaatatttcattgtctggatggaccacagtttatttctccattcacctactgaaggacatctcggttgcttctaagttttggcaattatgaataaagctgctataaccatcaagtgcaggtttttgtgtggacctattatcaactaattcgggtaaatctcaaggagtgcaattgctggatcacacagtaagagtgtgtttagttttaagtggctgtgccattttgcattcccaccagcaatgaatgagagtttctgttgctccacattctcactaccattcggtgttgtcagtgttttgcattttggccattctagtaggtgtttacatggtatctagtcatttgaatgggcatatgatgtggaacatctttttttttttaattttattattattatactttaagttttagggtacatgtgcacaacgtgcaggtttgttacatatgtatacatgtgccatgttggtgtgctgcacccattaactagtcatttagcattaggtatatctcctaatgctattggaacatcttttcatgtgtttatttgccatctgtatatcttccctgatgagttggggatgcattctttccatctcagagtccccagaaactaacatagcagttggtacagagttggtgctcaacaaacatcagcttaggaactatgtcctatgtttttttgtttttttttttttttaaaaaggaatgtgagctgttcccaaaacgtatgtccttcccccatgcctctaccctgcccttccacaaactttctgatcttcagcacacactacccaaccatcaaggctgagacttcccgtggccagcagtgtctcatgctggcttcaagccccacagcactgcttttttcaacttctcttgtggtttagactgtctttagcccagcaagagaattcattgtcttatcccccattaaactgtacctacactctttgaggaaaagggtccatcttacttaaaatattttaaaaattcacatgtgataaaactgatgtgtatgtgtatgagagagagagaaagagagaacagttctatgaggcttaatgtatacatgtggctgtgcagcccactgccccatgtcaccattttcaattctgtcattacccctgggacaatgtcttgtcaatatacacttgaggctgggcggggtggttcctgcctgtaatcccacctgtaatcaggagttcaagaccagcctggccaacacagcaaaaccccgtctctactaaaaatacaaaaatttgctgggcgtggtggcacgggcctgtaatcccagctactcaggtggctgaggcaggacaatcgcttgaaccggggaggtggaggttgcagtgagccaagatcgtgccactgcactccagcctaggcaacagagcgagactctgtctcaaaaatacatacatacacacacacatacacacacacgcgcaagagacacagtgagtagaaacaccga

SEQ ID NO: 626 - DNA, 224 bp, Homo sapiens
gaccaacatggtgaaaccctgtctctactaaaaacacaaaatttagctgggtgtggtggtgcgcacctgtaatcccagctactcaggaagctgaggcaggagaatcacttgaacctggtaggtggaggttgcagtgagctgagatcatgccactgcactccagcctgggtgacagagcgagactctctctccaaaaaaaaaaaaaaaaacctagaccagatgca

SEQ ID NO: 627 - DNA, 468 bp, Homo sapiens
tcagcattaaaatttggggaaaaaaatgtttgaagatcaatgaaaaatagcactggactctatatttacttatataagattttttttttaaatcttgatgaaaatttttattaggctagaattgcagagctgcaagagaattctgagatcaacaggtctttttccttcatttaccagctgagaaacttggggtcataggagattaagattgtttatcttaccagttgaattcaatactttcagaaataattgttagaattcagtgaaagttattctcttaaaagtacactgcttttcagctcctatcaagtgtttccctatgcttccacaatcctgattatcaatttgggtatgggccactctgggaaaggctgtcaaatgtttattctagaatccagcaactcccagatgtccatctccatctcaggttctggtcaaagtctgatgtagcaaagaaacagagtaaca

SEQ ID NO: 628 - DNA, 222 bp, Homo sapiens
ccaacatggtgaaaccctgtctctactagaaacacaaaatttagctgggtgtggtggtgcgcacctgtaatcccagctactcaggaagctgaggcaggagaatcacttgaacctggtaggtggaggttgcagtgagctgagatcatgccactgcactccagcctgggtgacagagcgagactctctctccaaaaaaaaaaaaaaaaacctagaccagatgca

SEQ ID NO: 629 - DNA, 468 bp, Homo sapiens; identical to SEQ ID NO: 627

SEQ ID NO: 630 - DNA, 224 bp, Homo sapiens; identical to SEQ ID NO: 626

SEQ ID NO: 631 - DNA, 1854 bp, Homo sapiens
ttttttttttgagactataaacatatatatacacgtagtattttctatggttgccaattcttatgctagatgttagcattacaaattcgtataaaatctgtgtccgccttcatagtccaacaacaaacgtttgctgagtgtagaactcccaggagttctctcatggacacaacagccacactcaccctcacattagctggcagaggccctttataccagtgatacgcttgggccaagggcccctgggttgaaaatcattaggtagacaccatccagtgccctgtctcatgtgctgaacagggctagtaatgccgactttcactttgggaggccaagtcgggtggatcacttgaggccaggaggtcaggaccagctagccaacatggtaaaaccctgtctctactaaaaatacaaaaattagctgggcatggtggcatatgcctatagtgccagctactcaggaggctgaggcatgagaatcacttgtacccaggaggccgaggtttcagtgagccaagatcatgccactacactccagcctgggtgacagagtgatatagatctcaaaaaaaaaaaaaaaaagtgtcaacctttacttctattttatcaagttcttgttccagcctgtccttttcaaaagataccctccttggtaaagattccaaagttttgggttttctttaaatgtatgcatccaatgtctttttcatttcattaaggtcaaataaatatttgtcctgggtttccaataaggtatttgagattttcctgtgccataatgactgtatttggtacaggcaaggcaatatactaaggtctctctacagatcttgaaaatcagatcagccttggaggatgaaattagtaacaactaatacaccctggaggacaccagccctttggaaggcattcattggaagagactagaaaagcagttgaggttgggagtttctcatttcaggcaaagtgacaagggagtggtatcagaaaatacgatcttaactaagaaagctagaacctatatcactctagaagactgttcacaaacggtagcagggcccatgtgcagcttggaaagaggaagcttaatgtgcaaaaatttaatatccctgcaactctctggaaattggcaagatggtccctcagaagagcagatctgtgtggtgagtgagatatcacagctccatgaggtgaacaccaaaccttccaatcatcagttgtctcccatgtacttatggagaatggtagacaaaactcactgaactgcttcatttgtacattgatctcttgtgaccttgctttgtgggagttagtcccagagaatctttataaactggcaagattttctgacctaaagaggtaggatctgtggaaaatgatgacctaccaaagtacaaatctagagaactgaggtttggagaacatgaaaaccatggtcaaacacgtgaaggcctgccactgggaagaggaattcaactagcaatacacaggcccaactaatatgtaagaaagacactacaaagtagtagttaagaacacaggctctggagccaaacgacttggctctaacacttactggctccatgaccttgaacaacttaggttccatgtgccttaatttctccatctgttaaataaagtgattgtgaagatttaatgagataatccaaataaatgcttagtacaatgtatggaacacagcaagttctcaagagactagccattacatcattattatccaaagaagaaacagaccaccctgtaagatttggaagggagctcccccaggactcctcccaccccctgccaggggtacagagagactagtttattgagggccaaacacaaaacttg

SEQ ID NO: 632 - DNA, 2128 bp, Homo sapiens
tctacctccgggctgaaacgtcaccatgcctccccacagacagacggatggacagatgggcctccctgcacctgctctgtgggtgtgggggctcctgctcagcagcagtttccagacccttctccctgctttccccaagccacccgccttgaatctggggtgctctaccagacccatcccctcatttctaaagatttgagccactagtcgtgtccctctccctcagaaatgccttggtgacacttggctgctttcaactcttccacccatctgcctcttggtctcatctttaccttctgctaaaggtcctgacccccacccccgccacgccatggggcaccccatggtggtgcgtccttgggagcagctctgtccctttccccgtggcctttgccccgcctcctatgacttcgattcccacctgtccccgacccctgggaccactgaccgggcccgatcaccctgtcactgccctgtcatctgcttaccccacacggtgctctgctgacccaggtcttgctgtctcccaacagccccacgaggcttcccgtcgctcctggacactgcaggctgagcccgctgccccgccgcctccatgaggaaggcttttcctctgtgagccccaggccaccctttccctcctttaagtaattacttaagtcccttgccagggccctcccagtaccctttctaaagacacccctgccccagcatgctgcaggctcctgctccactttcctctcaggccctcgtcgctgtggtgctgcctttgttttctgtctctgccacggcagggggtcagctccttggaggtggggcttctgcccttgctgtaccactgcctggcacacagtaggtgctcaataaagacttgcagggtgagctgcctgaagaatagtcaccagaggccagaaatgtctagagctctgccggtagggtgactggccgaggagcctggcctgcatgtgtgcgtgtgtgtgtgtgtgtgtgtgtgtgtgagtcagggtttatatgcaggtgtctacaggagacatgctgggttctgtgctgggtgtgaggaatatgggagcagaaccccagggaggtggcagagacttgggggccaaagggctggggtgcaggggggcaacagccaggtgccactggccaccccagccgcagggagccctgcccaccctccaggtgcctggatgtccaacctcactgctattcccacctcaagccaggcctggagatggaggccccatgactcagccagggccggtttgcagctgcggctgacccagacgggcgggcagcccccagcccccgggcctgcacccaggacagggccgccctccctccctcccccgcttctggctcctaggacaggattctctgaattcagctcccctgaggctggggccaggttggaggccaggcctgggggctctgggctggggtcccagataggggctgggcggccaggcttggaatctggaatccagccccattcctggcatctgcaggagcctcgtggggagggagacttgggatggacttcaaccagccagggctggattcttgccccggaacctgcattcctggggcagccaagggatccttcccacttctgggcccagcttggccctgcctggcattcgaggcccatctggggcttgggggtgtctccccaactctcagacataaggacacccttccaagcttgttccttcacctggcggggccctgagccccacacccctcccctgtcctttctccatccgacatcaagcgcctccctgcctctgctcgcacagtctctgagatggggaactcagcacctcacaggtgggcccagctctggtgctgtctgtgttgggggagctggggcagcccccaaaagaccttggagacagaccctcagaggcaggagcagaggctggcagtggatgctgtgcctggaggccttgagggcgaggtgtgatgatgaggcccaggctgcagggctctttctggctctccagctccggagaacaagggatttcctcctgctctgcccaccctccccagccagtgcatgctcagcctcagcaccgcacctgggcgccctccatgatctgccccacctggacacatggctcgaggg

SEQ ID NO: 633 - DNA, 2129 bp, Homo sapiens
tctacctccgggctgaaacgtcaccatgcctccccacagacagacggatggacagatgggcctccctgcacctgctctgtgggtgtgggggctcctgctcagcagcagtttccagacccttctccctgctttccccaagccacccgccttgaatctggggtgctctaccagacccatcccctcatttctaaagatttgagccactagtcgtgtccctctccctcagaaatgccttggtgacacttggctgctttcaactcttccacccatctgcctcttggtctcatctttaccttctgctaaaggtcctgacccccacccccgccacgccatggggcaccccatggtggtgcgtccttgggagcagctctgtccctttccccgtggcctttgccccgcctcctatgacttcgattcccacctgtccccgacccctgggaccactgaccggggccgaatcacctgtcactgccctgtcatctgcttaccccacacggtgctctgctgacccaggtcttgctgtctcccaacagccccacgaggcttcccgtcgctcctggacaatgcagggtgagcccgatgccccgccgcctccatgaggaaggcttttcctctgtgagccccaggccaccctttccctcctttaagtaattacttaagtcccttgccagggccctcccagtaccctttctaaagacacccctgccccagcatgctgcaggctcctgctccactttcctctcaggccctcgtcgctgtggtgctgcctttgttttctgtctctgccacggcagggggtcagctccttggaggtggggcttctgcccttgctgtaccactgcctggcacacagtaggtgctcaataaagacttgcagggtgagctgcctgaagaatagtcaccagaggccagaaatgtctagagctctgccggtagggtgactggccgaggagcctggcctgcatgtgtgcgtgtgtgtgtgtgtgtgtgtgtgtgtgtgagtcagggtttatatgcaggtgtctacaggagacatgctgggttctgtgctgggtgtgaggaatatgggagcagaaccccagggaggtggcagacacttgggggccaaagggctggggtgcaggggggcaacagccaggtgccactggccaccccagccgcagggagccctgcccaccttccaggtgcctggatgtccaacctcactgctattcccacctcaagcaaggctggaaaatgaaggcccactaatccgccaggggcgggttggcacttccggttaaccaaaacgggcgggcagccccagccccctggcctgcacccaagagaagggcggcctccctccctcccccgcttctggctcctaggacaggattctctgaattcagctcccctgaggctggggccaggttggaggccaggcctgggggctctgggctggggtcccagataggggctgggcggccaggcttggaatctggaatccagccccattcctggcatctgcaggagcctcgtggggagggagacttgggatggacttcaaccagccagggctggattcttgccccggaacctgcattcctggggcagccaagggatccttcccacttctgggcccagcttggccctgcctggcattcgaagcccatctggggcttgggggtgtctccccaactctcatacataacgacacccttccaagcttgttccttcacctggcggggcccttagccccacacccctcccctgtcctttctccatccgacatcaagcgcctccctgcctctgctcgcacagtctctgagatggggaactcagcacctcacaggtgggcccagctctggtgctgtctgtgttgggggagctggggcagcccccaaaagaccttggagacagaccctcagaggcaggagcagaggctggcagtggatgctgtgcctggaggccttgagggcgaggtgtgatgatgaggcccaggctgcagggctctttctggctctccagctccggagaacaagggatttcctcctgctctgcccaccctccccagccagtgcatgctcagcctcagcaccgcacctgggcgccctccatgatctgccccacctggacacatggctcgaggg

SEQ ID NO: 634 - DNA, 2132 bp, Homo sapiens
tctacctccggcctgaaacgtcaccatgcctccccacagacagacggatggacagatgggcctccctgcacctgctctgtgggtgtgggggctcctgctcagcagcagtttccagacccttctccctgctttccccaagccacccgccttgaatctggggtgctctaccagacccatcccctcatttctaaagatttgagccactagtcgtgtccctctccctcagaaatgccttggtgacacttggctgctttcaactcttccacccatctgcctcttggtctcatctttaccttctgctaaaggtcctgacccccacccccgccacgccacggggcaccccatggtggtgcgtccttgggagcagctctgtccctttccccgtggcctttgccccgcctcctatgacttcgattcccacctgtccccgacccctgggaccactgaccgggcccgatcaccctgtcactgccctgtcatctgcttaccccacacggtgctctgctgacccaggtcttgctgtctcccaacagccccacgaggcttcccgtcgctcctggacactgcaggctgagcccgctgccccgccgcctccatgaggaaggcttttcctctgtgagccccaggccaccctttccctcctttaagtaattacttaagtcccttgccagggccctcccagtaccctttctaaagacacccctgccccagcatgctgcaggctcctgctccactttcctctcaggccctcgtcgctgtggtgctgcctttgttttctgtctctgccacggcagggggtcagctccttggaggtggggcttctgcccttgctgtaccactgcctggcacacagtaggtgctcaataaagacttgcagggtgagctgcctgaagaatagtcaccagaggccagaaatgtctagagctctgccggtagggtgactggccgaggagcctggcctgcatgtgtgcgtgtgtgtgtgtgtgtgtgtgtgtgtgtgtgagtcagggtttatatgcaggtgtctacaggagacatgctgggttctgtgctgggtgtgaggaatatgggagcagaaccccagggaggtggcagagacttgggggccaaagggctggggtgcaggggggcaacagccaggtgccactggccaccccagccgcagggagccctgcccaccctccaggtgcctggatgtccaacctcactgctattcccacctcaagccaggcctggagatggaggccccatgactcagccagggccggtttgcagctgcggctgacccagacgggcgggcagcccccagcccccgggcctgcacccaggacagggccgccctccctccctcccccgcttctggctcctaggacaggattctctgaattcagctcccctgaggctggggccaggttggaggccaggcctgggggccctgggctggggtcccagataggggctgggcggccaggcttggaatctggaatccagccccattcctggcatctgcaggagcctcgtggggagggagacttgggatggacttcaaccagccagggctggattcttgccccggaacctgcattcctggggcagccaagggatccttcccacttctgggcccagcttggccctgcctggcattcgaggcccatctggggcttgggggtgtctccccaactctcagacataaggacacccttccaagcttgttccttcacctggcggggccctgagccccacacccctcccctgtcctttctccatccgacatcaagcgcctccctgcctctgctcgcacagtctctgagatggggaactcagcacctcacaggtgggcccagctctggtgctgtctgtgttgggggagctggggcagcccccaaaagaccttggagacagaccctcagaggcaggagcagaggctggcagtggatgctgtgcctggaggccttgagggcgaggtgtgatgatgaggcccaggctgcagggctctttctggctctccagctccggagaacaagggatttcctcctgctctgcccaccctccccagccagtgcatgctcagcctcagcaccgcacctgggcgccctccatgatctgccccacctggacacatggctcgaggg

SEQ ID NO: 635 - DNA, 290 bp, Homo sapiens
gatgtgtgtttgtgtgtgtgtgtggtgtgtgtatgtgtgtggtgtgtgtatgtgtgtggtgtatgtgtgtgtgtggtgtatgtgtgtgtttgtgtgtgtgtggtgtgtgtatgtgtatttctttgaatgagaaattggctcccatgattatggagctgacaactcccaaggtctgcaggcagcaagctggaggcccaggagggccggtggtgtggctgcagccggtgtctgaaggcctgagaaccaggagggcgggtggtgcagctgcagtgtgaaagccggcaggctcg

SEQ ID NO: 636 - DNA, 96 bp, Homo sapiens
ccaacatggtgaaaccccgtctctactaaaaatacaaaaattagccgggcatggcggcacgtgcctgtaatcccagctactcaggaggctgaggca

SEQ ID NO: 637 - DNA, 2649 bp, Homo sapiens
cttgtaggtactcattgaggtttattgtgtaagatgaatgaatgttgcaaattcctaaacatgtgattcagatgcccaatcttactctgttactttatgaaaattttttaaagctatatgatgttatatcaaaatatgttgttatactttaggataatcggtgtgttagccctgaatttcagcataagtcccatttttttccatgggagtctaggaaagctatatgtttattcagcagcaaaatacagtttggaacttaaataaactattgatcaatttctggtcttatgctagaaggaataaagcatcaagaaaaagaaaagatttgctgtcaagaccaggaaaatttgacaatagagtattagaatgcaggaaatgaggggaagtggaaaggcagcaagtaggagagaaaaagtgcagggacagtagaaagtgaatgtaggagctttctgacccatgcacttcaggaacgcaattcatccctaaaatgctgtttgctgtcttaggttgcaagtaaccaaattaaaaccagtttgaaagtagagtgagacagctgtcatcataagagtcatttgatctgtttaaaggtggctgcttgtatgcagggaccaacagtcatgttcagggcagcagctggtgcacacttcaagcacagaccataagagctaccccaggcagcacctgctaccaatagtgcaaacaactcagagagacctcgttggcataagggaatactctatcctttctgagtaaagagcaagtagaactaaaggtttcacattttaaacatactttacattcctcctcttctggggctcaagcctacttttgggccaaagcggatgttatatctgacatagagtcctcggagcagcagttgttcctgaaagttcctttttgcatctttgtgcctcatgcagtggcttacaagtcaaccagacttctcccctgacttttgatgtgtaagagcttgtgtttcaaatgggtttggttttcttaatgtcaccctaggttggtggaaaggagagtaaatggaaatggggggagcagggtcccctggggaggtttaaacagatggaagtcaattgtctcttgagaatagaggaggctattgagttttcattccacactctgctcctgttctgtcagcaaagaacaagcactactctccagcaattgctttccactggactcccccacctcggcctccctacaaaaacctagggatcaacttagttcactccaaattagaaaatttaatagtcatttgtttcttcttgtccacagggagaaccattttctttccttctttcaaaattgcccaggtcttgtgaagggttattaacaccggaaagaaatacattttaataagcttaaatctcatttctacatgaaaccatcagattttagtactgtgatattttggtccctctgtcttttaggctctgacaccaaaattgccataatgaaggtgtttcacttcttctcatttatttttatgggatcttttattcccaaatgccttttcatcccagccaaagggagaaatgttgatagatctgccatcaagaaggttccaaagctggcctgtcaggttttctgttttcttgtttattatctttgaacttttgttttaaatgttttaaacacttatttaccatgtaactaaatgtctgatagtattgaaaatactttgtgggttttaatttatttaatgctcatgaaaccctatgaggtaggtactgatattatttttattttactgatgaggaaagtgaagcaaagagaagtgaaatgaaaggtagtgagtgatgggaccagggtttggacatgggcagtctggctctaaaatgtatgcttttaactactatgtaatgctgcctcacaaacaacttgtctcacaaattgatattctggatcagaggatgtcgactggcccgcaaatgtattttgtatggctcatacacagttcagaagttttaaaaatttacatagaaatctgcatttcctgacttcttttgaaaatgggaataccaaacatcattaggcttgaattcccaatacggcaacaacagctgagcaacaagcagctgtttagactaggcactcgctctccaatttccacagtccccaccaatgcagatcatagtatcgacttaaatttcctgcctgccttagagaagcttctgagcttgtgacctctattctagctgctctatgaatggacgctgccccagtacagcgaggacctgctgcaaaatgcatttcttagtcttcaatacttattcctccttgtaactggatttctggtaagttatgtctcatggtggatctgccccaaagatggagactgaatggcagtgagtcactcgccctggcctccattgttctggagaaggttccagccacatggttgatgtcagctggttttccagagccagagctgggttgcgggacagacacacctgcatctaatagtgaaaggcaaagttgaaaggccaagaccagcctgaggtctgagggaccaagggcttcacagaggccagaagttcagaggtggacataaaaggtgttaggagaataaggaagtgaaaagaacatagtacagtgtatcagaggaggagctccaggctggcaaatatcactccc

SEQ ID NO: 638 - DNA, 2649 bp, Homo sapiens; identical to SEQ ID NO: 637

SEQ ID NO: 639 - DNA, 190 bp, Homo sapiens
atgagaaagtaaacatacaacacagtaaaagttgttccaagtatttaaaaatgttctatatcttctaccttattatggctcaagatatagtaacttttgtggggttttatcattgtttttgttttattttgtgaaaacatccaagagcccgcaacagcctatagatttgcagatccttttctttcctggg

SEQ ID NO: 640 - DNA, 190 bp, Homo sapiens; identical to SEQ ID NO: 639

SEQ ID NO: 641 - DNA, 21501 bp, Homo sapiens
gaggctctggtcataatggcgaccacacttttattgaatatctgttgtgtactgtccaggtcttcacatttgtcacctcatttaattctcatgttaagcctgagtggaaagcattatgaagcccatttgaggaaagagaagagtgaagttcagaggcaaaagtcatctgtccagggtcctttgccaaatgacagctggcatggaaccctcctaaggctgattcctctatcctccttctcctaacagcacttcaggggcaaccttctcctctatcttttctccactcaccatcaaagaagccctcaatttcccaggattctaggacatttccctaaggtgggggtggtgggacaggtagtaagactgatgccttttaactttccaagacctttctttatttcctgagatgaataaataagtggcaatggggtgtggggatgtggtgaacacagaacaggaactggcagcatgcagctggcaggagggagctgtgatggccccacccctgtgaggaccacctaatcctaagcaggggccaaagctctagcagccaccattaaggaaaaacttttgaaattcacacattgtgaagcctgccagtccccgccaggtgaagagctcatggtatccaccttcagggctactttttaccccaggggccttgtctgcccgggcctgggtacctgggctgctctgtaaggcaggtaggggtgcttaccccactctcaaaaataaaccaagctgtcctgagtgtccagcaggagggcagcccaagctctgggggcagcgtgggtgggaggaggtcctacaggtggtggccgcgattatctgcccttgatgaagccctccagcacacggtcactgcgctctgacaaccagtagccagtcatggccgccacagccccaatgaagatggcggtgaacaccaagtcgcccttagcagccagcgtggccagtgcacagatgatgatgccaaagaacatctgctgcagcaccaccaactcgtcttctgtcatctctgagaagaagcctgctgactctgcagaggagcaagagatgcagcctggcactcgtatccctgttcctggtagttcttggagtctccccagaactcccacacacctgatcatcatggccaccaggcctgcccagcaagccaggcacactacatttactgctcaaaaccaccctgcaaggggcagttaccatccctgtctcactaaatgggaaagtgaggctcagagaggtaaaggggttggacttgccaaggccatgtggtggacaagttgggggcagagcatttattacgtgtatgagtctcgttccacggtcagactgtctggattgggatcccagctttgcgacttgcttgccatatagccctgggaaagtagcttcatctctctgcatcttcatttttacatatgtagagtggggatgagaacccaacttccagcgtcgggttgtttcaggggttaaatcagttaagatggggaatgcacctagaacagcatctgacacagtaattgctggggaaatggtccctgccatcatcgttgtgattaccctgcatctcaccacacccccggcctaggacagctctcagcaggccagggcaaacactggtcccattggatagatgaggaaacaggttaaggaggcagactgatttgatgccaggtctgattccctttgtaccctggaaggtataaggctgctgagagccaacctggagatcagatgtagagcccggtctcagtgcagcctccagggggctgggtggcagtagggatggggcagggcctggagctgccactgctacctggggaaggggcttgcctgccttctctttgaatgaggacctcccctctcccgccccagggctcacctgggatctgctccttcacacagatgccttccatctgcttgtagccctcggcacagatgcagcgataaccgccctcggtgttttcacactgcttgttctctcccggacacacctctgtctcacactcatccacatcttgaggggagggaggggtcagagtcctgctagggccccccacccagcaccctgactccatcttgtccatctctcaacactcccctctgcccttgcccaggcaacattccacccttccttcccccacctgcccatattccagcctcttcaccattcatgctgggtgaggcactcccaggtgcctgtgtcccatcagcaggagactcaccgagacacttggagcccacctgctgatagccagggctacacttcttacagcgacctggccctgcccccatgcagcctaggcaggccttggcacagtctggagagaggagagaaagatgagggtgagatgtgcacctaggcccaggggagccacgctccagaagcggaggcctgggggtgctctgaagcctgagaaggggaaggtttggagggacaggtgtggagcagctcttcctccactcctcacgtcccctcctctgcagaagtagacactgacctcggcactcataggagccctcagtgttcacgcagaattggtcagctccacagttggctccctctgtgccacactcatcaatgtctgcagagaggtgagcagggtgagaatttcaatccctatttagtagggaagctgaagccagagccgttggggaatggtcttgcctgggattaaatggtatggcagagactgcaagctgtctaccaacacagaagcagactagctggacttcaggctgcccagccagagaccacatttgccaacctgtcttgaagctaagtgtgtccctgtgattgagttctggccaacaggatgtaaacaggagtgatgagctccaccgttagcttggtcttaaaacaatgcttggactcctcaatgcactttctttcccttctcccttcctgagtgctggcatgtgggacacagagatgcccaggactcagcttcaaccatgcagacaacgcccaaggggatgattgtgcagtaagttacaggaataatctgggtactggaatgattatgactagcagagctcccctgccagcctggactactcactttgggactgtaatatgataaaaaaaaataaacctctaccctctagattcttttttttttttttgagatggagtttcgctcttgtcacccaggctagagtgcaatggtgtgatcttggctcactgcaacctctgcctcctggattcaagcgactctcctgcctctgcctcccgagtagctgggattacaggcacctgccaccatgcctggctaaatttttgtatttttagtacagacagggttttgccatgttggccaggctggtctcgaactcctgacctcaggtgatccaccccacttcagcctctcaaagtgctgggattagaggcgtgagtgagctaccacacccagccaacctctatactctttaagccacagtcttttggggatttttgttacagcagcttagcctttactttagtctatataagtggctaggctgggaccaaaccaagtcttgaacccaggtttcctgaccccaagttcagtgtcctcattctcctagccaacccttcctcatttttttttttttttttttttttttttgagatggagtctccctctgttgcccagactggagtgcagtggtgcgatctcggctcactgcaagctccgcctcccaggttcatgcccttctcctgcctcagcctcctgagtagctgggactacaggcacccgccaccacgcccagctaattttttgtatttttagttgagacagggtttcaccatgttagccaggatggtctcgatctcctgatctcatgatctgcccgccttggcctcccaaagtgctgggattacaggcgtgagccaccgcgcccagccccttcctcaatttttaggacttggccaaagtaacgcctcctccaagaagcctttcctgattccccatcaccacttccactgaactagatcagaggcatctctcactgtacacagggactatactacacagtacctgtgtactggactgtaagtatctggttacttttctgccttcccagccaggttgagatctccatgaaggtggagactaggctagtctagcccaggcttgtgttgagagaataaaggaccaagcccaggcccctgaccatcttcccagacctagctagggccccacttacctacacacttgaggtgatgcagggcccagcccttcttgcattgcaaacagtttgattcctcaggtcctgagcatcgggcacaggggccaaaacaagctgggtggaatgggggcagcatgaggatgggcaggcaggtgccccatctgcccctgcccagtgccacaccttttggctacctacccgaacataccagatggctggcgttgcgttctgcctcaaagtagccaaggccacactggccacaggcctcacccccgtagccggcttggcagtcacagtgcccgctgccccctcgtgtcccttctccttcacactgcccgtagccaccgcagggcctctctgttcccccaggacaggctgtgggaagacaccaaaccaggtgaggtcatctatacaaccttgatatacaagataatattttctccctctccctctccctctcccttgccttccctccctccccccctcccctccccctccccctttccctctccctctccccatggcctccctctccctctccccatggtctccctctccctctctttacacggtctccctctgatgccaagctgaagctggactgtactgctgccatctcggctcactgcaacctccctgcctgattctcctgcctcaacctgccgagtgcctgcgattgcaggcgcgcgccaccacgcctgactggttttcgtatttttttggtggagacggggtttcgctgtgttggccgggccggtctccagctcctaaacgcgagtgatccgccagcctcggcctcccgaggtgccgggattgcagacggagtctcgttcactcagtgctcaatggtgcccaggctggagtgcagtggcgtgatctcggctcgctacaacctccacctcccagccgcctgccttggcctcccaaagtgccgagattgcagcctctgcccggccaccaccccgtctgggaagtgaggagcgtctctgcctggcggcccatcgtctgggatatgaggagcctctctgccaggctgcccagtctggaaagtgaggagcgtctctgcccggccgccatcccatctaggaagtgaggagcgtctctgcccggccgcgaccccgtctgggaggtgaggagcgtctctgcccggccgccctgtctgagaagtgaggagcccctccgcccggcagccgccccgtctgggaagtgagaagtgtctccgccgggcagccagcccgtccgggagggaggtgagggggtcagccccccgcccggccagccgccccgtccgggaggtgaggggcgcctctgcccggctgcccctactgggaagtgaggagcccctctgcccggccaccaccccgtctgggaggtgtacccaacagctcattgagaacgggccaggatgacaatggcggttttgtggaatagaaaagggggaaaggtggggaaaacactgagaaatcggatggttgctgtgtctgtgtagaaagaagtagacacgggagacttttcattttgttctgtactaagaaaaattcttctgccttgggatcctgttgatctatgaccttatccccaaccctgtgctctctgaaacatgtgctgtgtccactcagggttaaatggattaagggcggtgcaagatgtgctttgttaaacagatgcttgaaggcagcatgctggttgagagtcatcaccactccttgatctcaagtacccagggacacaaacactgcggaaggccgcagggtcctctgcctaggaaaaccagagacctttgttcacttgtttatctgctgaccttccctccactattgtcctatgaccctgccaaatccccctctgggagaaacacccaagaatgatcaataaaaaagacaaaaaaacaaaaaaaacaagataatattttctgctctgcatatcagtaaacatttttggagaagaaaattaattttaatgacataatattttgtcataaaactgacatttacttaaccaatttcctcttgtggaacaattagattttacagaccttttatttatttatttatttatttatttatttatttatttatttatttttagtgacagggtctcgctctgtttcccaggcaatgacatgatcatagctcactgcagcttcgaactcctgggctcaagcaatcctcccacctcagcctaggggaacaacaggctgcactaccatgccccactattttttttttaagagacagggtcttgctctactacccaggctggtctctcaaactcctggcctcaagtgatcctcctgcctcagcctcccaaagtgctgggtttacaggtacgagccactggaccaaatattttcttttttttttttgagacagagtctcgctctgtcgcccaggctggagtgcagtggcatgatctcggctcactgcaagctccgcctgccgggttcatgccattcttctgcctcagcctccagagtagctgggactagaggcgcccgccaccatgcccggctaattttttgtattttttagtagagacggtgtttcaccatgatagccacgatggtctcgatctcctgacctcatgatccacccaccgcagcctcccaaagtgttgggattacaggtgtgagccaccgcgcccagccaatattttcttttacaaagactgaatttgccatctttgtagctagctctttatctgtagcttcaggaaagactgctctaaaagaggctggtagtaagttcagctcttgtgccaggactgtgtgtgaggatggatggcgatcatggaggctccaggtcagcacccgcccctccccaggaaggtaccatagtccgatctggcatgggaaatgaaggggctgggaagtctatcatttctttagtacatgatgataactatactgcatatgactcagtctagcccctgtgctttctccaagcctttccccactgatttgcccatctccccagccctgtcaggcaggcaagaactgaggtccagagaagtttatctgagtagcctgagttcacacagcgaactagggacagagccaggactggatccctggactcggtggtcccctcccatccccaagagcaacttaaaaactcacgaaggcaggagggcccgaaggtgcctgcggggcagcagagcttcagggaatctgagcacagccactggaagaggtccggggcctcctgctgcctgaggcaggggcagggtggagggaggtggggaggaggtgctgagatagtgtcataagtgctgttcccattcccccatgcctgaatctgtgattcaacccagcttggacataagacccaaaaggccatctgaccaatgccctttccccatttggcagaagggtaaactgaggctcaaagtggagcgcaagtcccccggcaagttcttagcagacctgggtttggaaggagcacaaccaggacatgggccccagcatgcacccccctgcttctcggccaaatcaggccttatcaccaggcctcacctgtgacccacttccagggaaggccctttgccactcacttgtgaaaccaccagctctccaccagctcctcactcagctccagcaggcggtggcactcgaagtctgacttgctgcacacaccctccagcacctctaccaggcgggtctcactgatcggacagggcagggctggtgggaaacatgccccaccccacccaccaccctcctcaagtctctctccacccttcctcgtgcggtgaaaatatcaaaggagaggccatgaggtataatggaaggggtcatggttctgggaagcagagagacctgggttcaaatctagtggtagatctagtgggcaagtcacttaacctctctgaacctctttgttttgtcatctgtaaaatggggatgacaataccttccctgcaggtttgttgtaacatacatcagttcctgcatctgagcaatggaatataatacccttgctgggtagatatggctaaaaatacatcctataacaagtgttggcagggatgtggagaaattagaatcctcccacactgcaggtgggaatacaaaatggcatcaccactgtggaaaagcagttcctcaataagtaaaacatggaattgccataggacctgccaattccactactggatatagacccaaaagaatggaaaacaggtgttcaaacgaaaacttgtagacaatgttcatagcagcactattcacaacagccaaaaggtagaaacaatgcagatgtccatcaactgatgcatggttaaacaaaatgtggtacagccaaatgagaatattattcagccataaaaaggaataagtattgatatatgctacggtatgggtgaaccttgaaaacattatgctaagtgaaactagccagacacaaaaggccacatattttatgattccaatgaaatcagcaaatccataatttctgcttgactaacacaaattagtgattgccaagagccgagggaaggggagaatagggagtggctgtgtaataggtataggattttttgggggggtaatgaaaatgttctggaactacatagtggtgatggttacacaacattgtaaatattattaaatgtctttaatgggaaattttttatgtgtattttaccacaaatatatacatatatatatatatatacgcatatatatacgcacatatatatacgcagacatatatgcacatatatatacacacacatatatatatacacacacacatatatatacacacatatataaatatttgatgtcttatatcctgtatttaaagggtctggcacagtgcctggcatataggaggtgatttaaaaaagcaagcaacgcaggagccattacaaagctggaagtgcctctggggttgtcttagccaatcccctcattcctgaatgaggaaactcaggcccggcgaaggaaaagagaaaatgaccaatgttacataataacaaaacctttatttctagtgggcatcccagttaagccttttccacacttctatgaaataggcaaaccaggtattaatatccccattttacaggtgaagaaactgtggctctgagaggttaagaaccgacaaccaggtctaactctgagcctttgctgactcctcttccatctgactttgaaaagctggagggctcagggctcgcctttctgtatccttcccatgcctttctttacatactgactatataaatggctttctgtattacatatattgactatataatggctttctgtatccttcccatggctttctttacatactgactatataatgacaactctcaaattcctgtttccaattcctactcttttctgaattccagatttgtatggagtctacctggatgtctaatggacatttcagcccaatacgttcaaagaacaccacatcccacccctcccctaaaccttctcggtttcgcatctcaccatcttagaaaacagctgcactactcacccagttgctcaggcccaaaatctagtaagcatcttttattctactgtttctctatacccataatgaatctatcaccaggtcctattgttctctctgcaaaatatacccagactgtgacctcttcatcatgtcctccactagataccacactagcttgtgttgcctttgtacctagatgatgcacttgcctcccaaactggtctccctgcttcctccgcccttgccccttacaatccgtttgctacatagcagtgtgagtaatctttaaaggtgtagagaagacagtatcactttttctgctcatagccttccaagagcttcccattacactccaaaaaaaatctaaactcttttctgtagccctcgaggcttaagcctttgccttcaccttctagcactctccccttggctcactccactccagccacttctcaaatacaccaagctcagtcccatcctctgcccaattccctccctgtcacatagctcgcttcttcacttcctgtctctctgttcaaatgccaaaccttgaacaccttgcctcccaccgtcctgcagtctaccgtgcttcactgtttgttcttcatctgacataatattattcacttactcattcactgcttgtcttctctactagaatgtgagctccaggaagggggcattttgcttgccttgtttactgctatactatagatgttcagtgctatttgttgaatgaataagtgctccccaagagttcctagccctacaccagcagagcagagatttggcggggaggggaatatacaccccttcccccagcagccccttacctgtctttgtatttggacaaattctcttcctcccaggcagtgtttccacctccaaagttgtcccggatggttctctccaggccctggaaacagaaaattagtaatagctaagtacagtgcctggcacatgctagcacttcactgttctactgactaggaaactgaggcacagaaaggcaacctgcctagggccatacaactagtaagagaccaagatgaaacttaaatccacgcagatttgcatcccagagttccccactctaaatcgctgtgttcccctctaacgaggctgccggtgcacccaccttgttaaagctgtcaaccagtccccggcaggtatgacacggatggggctgaggcgggggagaagactggggaggtggagagggctggagccagataggtcctgggaggttgaggaagaggctgaggccccagagcacagctgggactaggcccttcgggggccatggggccatctttacccaggctggggacctgcagatagagggcgtggagaggcttcactgaaggagtcaggccccacgcgagaaagaaaaaggtctgttctaaggtgccgtggcgctgggatctgcgttattacaagcaaaagaggccaaactgggtattgcaggggctgtggggatgggtggggaaaggcgcataagatgcaattccagaagagaaataagttatcctcgctagcatggggtggagaggaaagtggcctcgctccttgacaagggggcagaagtcagcctcttgtctgagggtctgataaagaatattaggggccggatccgcagaattagggagaagagatcagattccaagtactgaaggagaggaggccagaggggttgtcttgggggaggtgtccggaaccccgggcttggagggaggagcccggatccggatatgaagggaagggatcagattcagggcctcgcagaagggcaaaggcacggcccacgagccggcagagaaggatccagaccctcgtaggccacggagaaggaagaagcgaccgccccagcccgcgggcgccgtgggccgtctcctcaccgcgtcgctgccacagcctgcgtaaaacgcacaacccccacccgcgccgcagtccagggggcggagcttgccgcccagccaatggcgacgggccatgtgccattacgtcaccccacgccagccaaccagaggcggcaccgagctgcacctgtccgggctttaaagggccgcggggctagggaacgacgtttgccagccccgccactgaaacggagacgcgtgtgggccacatgggtagaaaaacagcgtctgcctttatttaagtcccgtcccccgccccaggtcccgcccctggtcccaccccgcgtcccggcgcgggagtccccgggggatggaagtagctatccagggctggctgaagggcccgggacacttgctccgctctctcttggagccgcccggaacgcggggcgcgaggctgctgcagggcccccaggaagtctggcagttgggagggcagtgtgaagacgggcacggtgcggaaaagggcgggtacggcgtccgggtggagcagcctgtcgaagcaggcccccacgtagctgccgggcgcccggccctgcaagaagtcgggcagcacgcagctgagcgaggcgcggaaggcgtcgtgcgggccgtgcgccccgggcccggacaccccatcctgtagccactcgctgcacagcgccaccgcaccgggagagaagagcaagaccaccacgccgccctcctgcagggtctggcgccgctgcgcgtgaaaccaagccacgggcccctgcgcgctcagttcacgacggctccacaggtctacggccacgcgcagcggcagctggcacagggccgacgccagggcgcccaccaggcgctcgaaacccgagtcatcggctgagtagaggagcagagccgcgcggcccctggcggccgctgccggagaaaacagatggggagggaagaggtgagctggcacaggcctggctccccgggggcggccctccgcccagcgcttgctcccactcaccccccgagcggacgtcctgtttcaagagcctcagccaccctgttaggggagaggggcggaggcagccagtgagctcggccgccgctttccctcggagaactcccacagccactctggtcctcccccaggggaatggggagccgggaagcgctcacctttcgcgtgatcctttttgagaaggaggatgagggaaagcgcagcggcaaagagtaggcaggccagccacacgagggcccagcgcttgtggatgtctgggagacccagagaagaagagttagaaacttaccctccacagagaagaaaaactgagacttaacagaaatgaattgggccgggtgcggtggctcatgcctttatataatcccagcacttcgggaggccgaggcgggcagatcacgaggtcaggacatcaagaccatcctggctaacacggtgaaaccccgtctctactaaaaatacaaaaaattagccgggcgtggtggcacacgcctgtaatcccagctactcgggaggctgaggcaagagaatcgcttgaactcgggaggcagaggttgcagtgagccgagatcgcgccattgcactccagcctgggcgacagggtgagactcctctcaaaacaaaacaaaacaaaacaaaaaacgaagaaatgatttgcccagagtccacagcacagtgtcagagccagtggatgaatatagctccatctgtttaggggtctttgaataagtaatgtcaccctctgcctcagttttctcctctgtaaagttgtacctatgtcatagggttggtgtgaggactaaatatattaatacatataaagcttaacacaatgtgttaatacatacttaacacaatgccgagcatcttaagtgctaaaatgtcagctgtttttctcccctaagctagggttgctgggcccttgatcttgctgtcctgggtgtctgcaactacctggtgtccctgccctgtctttttttttttttttttacctccaattgatttgccttgaattgattcatgacagcctcagagatcttttaaaaatataaatttgggccaggtgcggtgactcacgactataatcccagcactttgggaggccgacgcgggcggatcacgaggtcaggagttcaagaccagcctggccaagatggtgaaaccccatctctactaaaaatacaaaaattagcagggcatggtggcaggcgcctattaatcccagctacccgggaggctgaggtagagaattgcttgaacccgggaggcagaggttgcagttagccgagatcgcgccattgcactccagcctgggcaacagagtgagactctgcctcaaaaataaataaaaaaataagtgtatatatatatatatatgtgtgtgtgaaatatataaaaatttgatcgtagctcctgctgctctcaacataagatccaaatcccctacatgtctcctgcatctttatctcatgacagaaacctgcctgtccaagaccctgtatctctacccccttcccctagctcagtcttcagagttttgctggaaccttccccctgagcccctcacccctcaccccacccaggtcaggtccacattgtatgcatttacagcactgaacacttggtggtgcttcagtagctcccactttaaatgtaagtgactggctcatgtcttgctagtcttctaggggtggggcgggggcaaggatttatatttttggtgttcctgcgatccctgcaagctctcatcattttttgagtgaatgaaggaatgaccctctgtttatctgatctcagggaaggacaaggccattgcatgtgctgtgcccaagagtggtccctgtcaagatccccactcctggtacagaaaggaaaggcagttcttacaatactcacatttgtccatggggcaggcccatagcgctcccaagtcatcgtcccatagctgtaagatacaaacagaaccaaatccagggcaccagccaggtgttccaatattcaccaagctctggtggcctgatctccaaatttccagcatcaactatgcatatctcccggctaaggttcctgcagctgctctgcctttgtgctgtgcccactgactagggtatgacttcttccataccaaatctggcttataggaagaaattcttcccggaagctctccctggaacccaaaacttagcacctgtaggtgtggttatctgtttatgggtgtctagccaacagtgtgctccttggggataggaactgtgcttcttctactcttaactttcccagggctgaacataaaataagcctaaatagacagtaggtgagtgctagttttaggcctgttgcccctaggcattgaggtggggcccttcttccaccagctcacctgcagacactggcctgactgcaggtcttgtagtaagtactctccaaggcgagctgccctctgccaagccaaaggatgggggcactgttacctggaggtagcacccttagggcagcacctaccaggctacagctgggtagaatgaggtagaggggactgggagactttggtgatgccgctgaatatggccctggtctgagtcaccccccatgttcccagagaccggcacagggtggatggagtgaaaatttgaggccagatgtgagatgcatttggagagatctgtggaggagggtcgcccagtcctaaccgtggaggctttgctgggtagtgaagtacagccactgggttccaaggcacagagggatctgttgtcctgggggcctcgtgtctccaacagtagcacatcgtctttgagaggccccagggagtctggaaggggtgagaggccactctgaccaagacccatccttgctgggattggccacttgcctgcctcccatgccctgaccttcacccctaggaggtggccctgccccagctgcccccaggcccaactcaccagcccacaagcactcctgcagctgcagcttctccgagctgttcacctgctgggaagagaccatggttagggccactaagaaaagcaaaagccaaaggcagaaagaccagaatggggcaggcaacagaaggcctgttgggttgggaatctgcactcaatctgacctgaggcagatgtggattcaaggctgggtgattaggaatcactacatctttctctgccccagccttgtgagatcatctgtataaagcgtcttctgaccctaaagctgtttttatgtcttacggagcatggttcccctctcatctaaccttctcaaagagattcctttctcacatgaccaccctgctaaaaattgcaaccccagtcccaccttatccctttcccatggtatttgtatgcaattttaagatactatatgatttatttacaatgtctgttgcctgcctttctccattacaatataagttctatgagggtagagatgttagggtctatcacaagtgcctaaaacagtgacttgtgctgctcaaaaaatcttgaatgagtgaattttttttttttttgagacggagtttcactctgtcgcccagtctcactctgtcacccaggctggagtgcagtggcgccctctcagctcactgcaagctcagcctcccaggttcacgccattctcctgccccagccttcctagtagctgggactacaggtgcccaccaccacgaccggctaattttttgtatttttagtagagatggggtttcaccatgttagccaggatggtcttgatgtcctgacctcgtgatctgccctcctcggcctcccaaagtgctgggattacaggcgtgagccaccgcgcctggccggatgagtgaatgttcttataatcaccctttgaaactgtagagcaacccattctacaggtatggaaatagaataaggatagcaataataaaagtggctacatttatggagcatttagtctgtaccgattcctaaggggaagcacttctcttatttcattgtcacaaccactccatgaggtagttactgtattatcatctgcattaaacagatgaggaaactgacgttcagagaggtgaagtgagttgcccagggtcccgcgcactactaaagtaggcagtggaactcccatagaggaagctggcaaccactatgctttagcggcccaagaactaagacccccttggctggggggtctgcccaggtccagcctccagcccagcactatgcacccctttctgacctgaacacagaggttagggtggcctttcagcaatgggaactcgagaaccttctgtggaaagagaggaatgggtgggatcacaaaaggggacccccggttccccactctcccctcaccacgggaggtgccctctgcttcacttacgtccacagtgacgttctcccaggaaagcggtgggaccagtggctggcaggggtccccacccggagcccgccagcacagtgccgcttctgcgggcagcgagcacggtgcgtccagcagccagctctgcagggtcagcagtcgcagtcgggcggcttgccagaggttctggtgtgcgcgggggtctgcaaggaaagggcacagtcaccgcaggccaggtacccatcgctcgcaacaccccaaccccagccccaggccggtcggctcaccctccctgaaggggcagatgttcgtcctaacggagtcaggttccagaggccacacctggaaaggaaatgggggtctgctcaggtcccctccatgggcatgtgcctggccctctgctggacagtggggatgcactcattcagcaggtatttcacaaacacttgctgggtcttcctgccttttacaaaacctggaggtgctcacatctattcttccagcaaacataatgctgggcactggcaacatcttcattaacaaacttttttttttttttgagatagagtctcgctctgtcgcccaggctggagtgcagtggtgcaatcttggctcactacaacctccacctcccaggttcaagcgattctcccatctcagtctcctgaggagctgcgattacaggaacatgccacaacggccggctaactggttaatttttgtatttttagtagagatggggtttcaccacattgatcaggctggtctcgaactcctgacctcaagtgatccacccgtctcagcctcccaaagtgttgggattacaagcgtgagccaccgcgcctggcccattcaacagacttttaatgagtgcctaccattgtgtcttagcagtatggcaagcacaagagaccttggataattaaatttttattatttttttattttttgagatggaatctcactctgttgcccaggctggagtgcagtggtgtgatctcagctcaccacaacctccgcctcctgggttcaagtgattctcctgcctcagcttcccaagtagcagggactacaggcgcacatcaccatgcctggctaatttttgtacttttagtagagactgggtttcactatgttagccaggctggtctcaaactcctgacctcgtgatccacccaccttggcctcccaaagtgctgggattacaggtgtgagccactgtgcctggtggataattaattttaattcattccacaatcactttgtaagcacctgctatgtgttggggaatgtgctaagttctaaggacacattcatttattctttcaacagacatttcaagagtgcctattatgtgcatagctctatgctaagcactagaggtaatacattaatttatccatcaagcctttagttaggaacaccgactatgtggcaggcactgtgtttggcaatgaagccatttaaatcacagcatacatctcatgaacatctgctgtgtcctatggctgtgttaggcagtaacatttattcactcattcaacagtgaggacctcatactgttaccttgtttaaaaacaaaacaaggctgggcgcggtggctcacccctgtaatcccagcactttgggaggccaaggtgggcggatcacgaggtcaagagatcgagaccatctggccaacatgctgaaaccccgtctctactgaaaatacaaaaattagccgggcatggtggcatgcacttgtagtcccagctacttgggaggctgaggcagaagaattgcttgaatccaggaggcagagattgcagtgagccgagatcacgccactgtactccagcctgccaatagagcgagactctgtctcaaaaaagacaaaaaaacaaaaaaaaaacaaaaacacaaaaaaacaaaaaacaagtaggcgctatgtgcaaggctcttgcaaagctattacatttgaattagatatgatttgcttgccttcaaggaaatcacaaactcacacttgtagtaaggataaaatatttatataaattagtaaaacactcattcatttcataatatttattgagcatctgttgtgtacaagaagaaattagatgcccaaataagaaagtaagtgattgagctgggtgtggtggcccatcgccacaaaacattaaaaaatgaaaacaggctgggcacagtggctcacgcctgtaatcccagcactttgggcggccgaggcgggtggatcacgaggtcaggaatttgggaccagcctgaccaacatggtgaaaccctgtctctactaaaaatacaaaaattagctgggcatggtggtgtgtgcctgtaatctcagctacttgggaggctgaggcaggagaatggcttgaacctgggaggcggaagttgcagtgagccgagatcacgccactgcactccatcctgggcaaaagagtgaaactccattaaaaaaaaaaaaaaaaaaaaaggaaacaattagccaggcatggtggcgcatgcctgcagtcccagctgcagaggctgaggcaggaggatcccttgaacctgggagcttggggctgcaatgagacgtgttcatgccactgcactctaccatgggtgacagagcaaaatgctgtctctaaaaaaaaaaaaaaaatttaagaaaataaaagaaatgaagtgataaatggacaaggaaagatagaagtgcaaggggatttggagctaggagaggccgggtggttggggaaaagctttgggaaggaggtgagggcatttgaggtaatgggaaccacctgagaaaaggcagggagctagctgtatcttggtaagtagctccactggatgtaacaatgttctcatgaaggggaatcatggggaaaatagagtgaaaaggcaccgttgggggcagaatatgggcccagaatgccaggaaagtgatgggaagggaggggagcttggaggtgttgaaacagtctagaaaacagatgatagagccctaagctggactgagatggagaggagggggaaagaaaatgagagacattaatgtcagaggtaagatggatgagacctgatgaccaattaaatgtgcaatcagcggctgggcacagtgggtcatgcctgtaatcccagcactttgggaggacgaggcttgtggatcataaggtcaggagatcgagaccatcctggctaacacggtgaaaccctgtctttactgaaaatacaaaaaattagctgggcgtggttgcaggcacctgtagtcccagctactcaggaggctgaggcaggagaatggcgtgaacccaggagaagcagcttgcagtgagccgagatcacgccacggtgctccagcctgggcgacagagaaagactctgtcttaaaaaaaaaaaaaaaaaaagtgcaatcagggcaagccacagtggctcatgcttataatcccagcacttggtgggaggctgaggtgggaggatagcataagcccaggaattcagaacagcctgggtaacatagcaagaccccgtctctacacaaaacaaaaaaaaactagctgagtatggtagtgctcaccagtagttccagctacttgggaggctgagacaggaggatcacttgagcccatggggctgaggctgcagtgtgccatgattgtgccactgcactccagcctgggcaacagagtgagaccttgtctaaaaaaataaataaatgtacagaggaagaggaaagagccagcatatttaagcctgggtgtggcacacattcttataacagccccatgaggctgttactattattattcccattttacagatgagaaacaggctcacagaggtgaagtgacttgcccaaggttacacagctagcaaatggcaagagccaagattcaaaccagtccaagttcgtagcacatgctctgcccgccaggggaacacaaagacagaactggaggagtagggaaaggtttcaaggagaaggtgacatttgaatggggccatgaagaataagcaggagttctgtggaggatcagggagagcattcagggaatgtaatagacagaaggcataggacagcaagggtcaagggagggccagccaccccagggagccacagtctccacctcaatgaagggtttgaagaatggtgagaccaggaaggcagggatcacccccatcatcatcttcccactcctcttctggcacccagctagactctgctcctacctgaatacagaggcagggaaccaggtctgtgtggttcaaggtaatgatctgcggtccagtctgtggaacaaataaaggaaggaggttggagaagataaggaggaagaggaggaggccaaagtcaaggaaaccaggaaggcagaagttcccccaccaattttcccttgcttggggtgagtcctcttcaaggatcctctctgatatggcactgcgtcctttgcacaggcatcggcctacagtgggaatggacttgggaagggggaggcctcaccaggtttttgtgccaccggggttttggggggccctggacctgattccagtacagggagaggccgaagtgctgctcctcagagacattcagaaccagatgcacgttgtcaccatctgctgacacgttgagccagggcagggctgg

SEQ ID NO: 642 - DNA, 308 bp, Homo sapiens
ttttttttttcctttttttttttttgagatggagtctggctctgtcgcccaggctggagtgcagtggtgtgatctcggctcactgcaagctctgcctcctggggttcaagccattctcctgcctcaggctcccgagtagctgggactacaggcgcctgccaccatgcccagctgatttttttgtattttttgtagagatggggtttcaccgtgttagccaggatggtctcgatctcctgacctcgtgatccgccagcctcggcctcccaaagtgctgggattacaggcgtgagccaccgcgcccggcc

SEQ ID NO: 643 - DNA, 1024 bp, Homo sapiens
gcggccgctgcaggtcgctcagcgacgtgcgcgtgcgcgggccggtcccacagcacgtagtggaagcacccgacggggcagccgctgcggcttctggcagctccctcgacagcttctccaggggttcactcaagatcagttggaacccctggcgccacgggctgtcatcagtggacagtctgcccctagatgagttgcccagcacggtacagctactgcctgccccgaccccagcccctgattctaccgccgctcggcagggggacggccagggagaggtccagccgcgcggcaagcctggggaatcccgcagcgcctccagtgataccatcgagctttgaagagcggtcctgacgcagggccaggaccctgcccgatgcccacatggcatggcctactgggacagttgagcctttaaaaaatgggcatcctggccaggcgcggtggctcacgccaggaatcccagcactttgggaggccgaggtgggtggaacacgaggtcaggagttcgagatcagcctcctggtctcgaacatagcgaaaccctcgtctctactaaaaatacaaaaaaattagccaggtggcacacgcctgtagtcccagctactcgggaggctgaggcgggagaattgcttgaacagggaggcagaggttgcagtgagccgagaccacgccattgcactccagcctgggtgacaagagtgagactccgtctcaaaaaaaaaaaaaaaaaaaaaaaaaaaaggcatccccaggcctctctacctgacggcaacccccgggggacagccaggtttgaactcaccccacccccatgccgttttttgcttttaatatttctatttttttttcagccggcattttgcacagaggccgtgtcttatgcggaatacagggtgggtgtgcatggattcgggcatgaagaacagggagcaggtgccccagactccccaacgtggagtgatgagcctcgcttgtctagattgtcctctttgtgccaaagaaataaacccttaggacttgg

SEQ ID NO: 644 - DNA, 7365 bp, Homo sapiens
gaaagcgtgttggccaaatctgaatgatgaaagccaattacaaactagaaaatgaaaacagaccccagatgcaaggagatgagacagttaaatttacttcctcttttctaatctgagaggtttcatgttgaagaaaatcagtgttggggttgcaggagacctaaacacagtcaccatgaagctgggctgtgtcctcatggcctgggccctctacctttcccttggtgtgctctgggtggcccagatgctactgggtaagtaaaatatttgaatattggtgtgggaatggagctttgcttaccttgggagaaaggaccagaaggaaagaaacatggactaattctggccctccaaagaagcagtattcaggtggaataagaagggtaggtataagaaagtttggtgtacaggattgaattactttctgaatataaaaatcttccatcctgaaagtcccctctgatcatgatatcctctctagctctaatctcaactcttttctttcacttgtgagacaagttttcttaaaagaatagtttgcacttgctatctccacttcctcacttctcacacgctcctcaatgcttgcagcctggcttccactggaattggttttgtctagggcacaacgatctctatattgactgggttatggcatgcttttcagttcatatcctgctggacttctctgctgcactgggctctgttgatcacttactccttcttgcattctctactaccctggcttccatggcaccattttctccttgtactacatggacttctcttgatcccttaatagcttctcttctcttccccttaaacactagtgttctctatagttatagccttgcctctgtactcctctttctttacacaatctccttcatgagcttatttgtctgtttaatttttgccactataactctgtatttaagagtcccaaatcatatccccaaccctaaccatgcttttgagcttcacattcaaatatcaagcttcataccagacatatctacctacatatctcacaagtgtctctgcaccatgtgactagagttgaacttatctgtccttttggcccctgcctcatctaattcattttccactttctgatctcagctaatgacaccagcatctacccttacaaggccataaacctcagaaacaacccagactcttccttctttttcattctctaaatctgatcaatcattaggtttggccaattttaccttctaaattgttcatagaagcagtcccttgcctggatcatcactaatgtcttaggacaagccctcatcctctatgacttgggctattccagtaaattcctaactaatctcctcgtccaaaccttgtgttcttgaaatgaattctgtaccctgcagacagagtaatttctaaaactcaagtttaccagcccaaattctttatcatggcacaaaaggccaagcagcctctacttttaccctctcagccttgtaacttatgctctaataaatctcaatcagttcatatttacatactcacacaccagactcttgcctgtctctaaggctttgcttataccactatctctacctgaaatgagttctttccatggcaccctactctccttctccttgcaaatgtgtaggtacccctaaagactcagcttaaatggtatcttttccaggtagcttttcttgaatgcttctttctgctccaatggctgcttgcgatacatttttcttattataatattttcctacttatgctgaaataatattttcatctacctgtgtcttccactaaattgagagctatttgtgggtagtgacaatgtttttttgtttttgtcttgtgataagaactgcagacttggaatcagatactcctgtttcaagcccctcttctatttaccagctctatgtcactttagaaaatcactttttctatttctggttcagttttctcatttgtagaatgaaaataataatacctaccacctaaggtttattgagtgagttcccagtaacccaacaagattttattttattttattttatgttttgagacagggtctcgctctgccacccaggctggagtgcagtggtgcaatcactgctcactgcaaccttgacctcttgggcttaagcaatcgtcctatctcagcctcccaagtagctgggaccacaggcaagtgccaccaggcctggccaattttttaaaaaattatttgttgagacagggtctctctatgttccccaggctggtctcaaactcctgggctcaagggatcctcccacctcaacctcccaaagtgctgtgattataagcatgagccaccacgcctggataagattttatttttaaaaagaaaaaatggagaggaggcagagcacagatgagtgacagtggaggaactgaaaagaggtagcattacagtgaagggagcggagaaaggatggaaagaaaacacctggtactgatgtgatgagaattaggaagtagggaggggtcttggtaagggacatgacaaaatcaaagaagaacgctgggctattgggagtggaagagaataaaggcaagtggggcacgaaatgacagtcagatggagtgaagaagtatgcacatgtgaatggccatgaggctggaggagggggagaatagttagggagataaagagcagtcccagagaagggagaaatgtcacttcccttgcctaggtctaccatgaaggtaagagataggttgaggagatgtggtgagaaatggataattctaaatttcaatctggagcaaagaattgttccacagttactaatatggactgggaggaggggaaaaaagacagagaaagctctgtgccactgccagggaaaattcaagtggcagaggacattaaagtaaagatggctgaaaagtgaagacctgcaagggggaggaagaaaggaggagagacactgctgggtactgaaagctctttgttagataacatattcaaggctgaggagccaagtgaagtttgggaaaatcagaatatgaaagaaagtccccgaggaaggtctgaggactgaagtagaccatatttgcacagtgaagtaaaaagaacattgattttggactcagacacacctgcctttcccgatccattgcttagtctctttttaagctttgggtatgttaatttggttttctaagtgtgtttctttaagattataaaatgaggataaagtcacctacctggaaagtttgtgaggatgaagttagatactgcacacaagtgctagcagggtctggcacccagtgaacattagaatctgatgtctccctttcattcctgtcctatgcctccctgcttcgagttaccattgtctttgctcctggtttcccgtaccagcagctggatgtcatgccggtgagtttcaccattctttcattctctcccctccctcttctccaaaccacagtgcatttgctgagagcacctggacgccagtgaatcaaggtcaaaactatccccctgagacactctcaggggtctttccgaaaaaaaaaaaggttttgatgtcttactagtctcattctaaaaaggatgattatcctgggagatggaggaaccctgtcctctttctccaagttgcatcatcattttctggttctccctgggccatgccctcttcagctgccagttttgagacgctgcagtgtgagggacctgtctgcactgaggagagcagctgccacacggaggatgacttgactgatgcaagggaagctggcttccaggtcaaggcctacactttcagtgaacccttccacctgattgtgtcctatggtgaggtcctgggaaggcctgagcagtgccccaaaccccttctttcagcctcagagcccacccaggaaagtgtccctaggaaattggctatgggatgaggtacttccttcccagtcttcagcccacagcaaccagggtgctctaagtcctaggccctagggaagttgtcccatactcccaaccaggggtgagagtttacctggaccctcagagaaagtttaggggagtaggcatgcttgggggtggcccccaagggaggccctgggtgacactcagctctttctctggaccatagactggctgatcctccaaggtccagccaagccagtttttgaaggggacctgctggttctgcgctgccaggcctggcaagactggccactgactcaggtgaccttctaccgagatggctcagctctgggtccccccgggcctaacagggaattctccatcaccgtggtacaaaaggcagacagcgggcactaccactgcagtggcatcttccagagccctggtcctgggatcccagaaacagcatctgttgtggctatcacagtccaaggtgagagctagaagcagcattgtcatggcaggggagggtaaggagagacagggagcccaaattgtctttctttagcctggaggtagcaagatcatcaacagactatggagcaggttgctggcaaatgcccaagttgggcttcgaaagggacgagacctcagccttttgaagtcatccagccccactcagagtccagcatagttcctaccacccagatctatgcttcctagtgctcactgattgggtgtctggacaactatcagatttgcccatctgtggatctttcctagtcctgtctacttacagaaagaacttgacagattcaaatggaatctaagagagcccattcctgctggaaacaggggaaaggaagtatgactccccaagtctcttcacctgcatgtgtctacctgtatataagatggctgagctcttctttcctgcctatctttttcccagaactgtttccagcgccaattctcagagctgtaccctcagctgaaccccaagcaggaagccccatgaccctgagttgtcagacaaagttgcccctgcagaggtcagctgcccgcctcctcttctccttctacaaggatggaaggatagtgcaaagcagggggctctcctcagaattccagatccccacagcttcagaagatcactccgggtcatactggtgtgaggcagccactgaggacaaccaagtttggaaacagagcccccagctagagatcagagtgcagggtgagttcgcatcagagtgcaggttgtctgtttggcatgcgtgtgagtgaaaaggagggataggataaattgacctgtgagctggggttcagtgtgagcaggttaagaagggacacagagggggcaggaacaatgggccagaatccctgatgatgagagacagcacaaatagagaacttctccctcagactgtggtgcacacctcaccagaccaagagctgagccagctccacacctgctgccccacaagccttagcatcccccccaacatgctctctgggcatttataggaatttaatatctggaatgaagatgggatagtctgaagtctatgttcaattctgggagccactgttaagaggctgcacttgacctgaaacactcccagaagaggtgtccagggtgataagggggcttaaagtcatgtcatatgaaaaataatggaaggggctggagatgctatcctgaagaggaggtgactcagaggccagcagaggtgtcctcaaaaagctgaaggctggcattagcacaaggaattggactaatgtcttatataataaagaggctgacctagaaccagttaccacattcatgcttcagggaattagattcagccttgatagagaaagaactggctaatagttatagctgtccagtggtgaagcctcactgctgaagaatttcaaacagaagtggccaagcttcagattaaaatttggaccaggagggacactagagtcctcaagtccctgctgccattgggccccacagccactttcagagaacaagaaagattggccagggatgggagggaagggccagagtcagacttcactcttgtatgtgcctcctgccccataattcaggtgcttccagctctgctgcacctcccacattgaatccagctcctcagaaatcagctgctccaggaactgctcctgaggaggcccctgggcctctgcctccgccgccaaccccatcttctgaggatccaggcttttcttctcctctggggatgccagatcctcatctgtatcaccagatgggccttcttctcaaacacatgcaggatgtgagagtcctcctcggtcacctgctcatggagttgagggaattatctggccaccggaagcctgggaccacaaaggctactgctgaatagaagtaaacagttcatccatgatctcacttaaccaccccaataaatctgattctttattttctcttcctgtcctgcacatatgcataagtacttttacaagttgtcccagtgttttgttagaataatgtagttaggtgagtgtaaataaatttatataaagtgagaattagagtttagctataattgtgtattctctcttaacacaacagaattctgctgtctagatcaggaatttctatctgttatatcgaccagaatgttgtgatttaaagagaactaatggaagtggattgaatacagcagtctcaactgggggcaattttgccccccagaggacattgggcaatgtttggagacattttggtcattatacttggggggttgggggatggtgggatgtgtgtgctactggcatccagtaaatagaagccaggggtgccgctaaacatcctataatgcacagggcagtaccccacaacgaaaaataatctggcccaaaatgtcagttgtactgagtttgagaaaccccagcctaatgaaaccctaggtgttgggctctggaatgggactttgtcccttctaattattatctctttccagcctcattcagctattcttactgacataccagtctttagctggtgctatggtctgttctttagttctagtttgtatcccctcaaaagccattatgttgaaatcctaatccccaaggtgatggcattaagaagtgggcctttgggaagtgattagatcaggagtgcagagccctcatgattaggattagtgcccttatttaaaaaggccccagagagctaactcacccttccaccatatgaggacgtggcaagaagatgacatgtatgagaaccaaaaaacagctgtcgccaaacaccgactctgtcgttgccttgatcttgaacttccagcctccagaactatgagaaataaaattctgttgtttgtaagctattcagtttgtgtattttgttatagtagcccaaatggactaggcagttggcctctgccacatgactgagtttatgatatgttaaaaatactcataaaacagtg

SEQ ID NO: 645 - DNA, 2593 bp, Homo sapiens
tgggcacctgtaatcccagctagttgggaggctgaggcaggagaatgaatcgtttgaacccaggaggtggaggttgcagtgagctgagaccgcaccattgcactctagcctgggcaacaagagcaaaactccgtctcaaaataaatacatacatacatacatgcatacatacatacatacatacggggattaaaatagtctagtagtgacacctgaacagagagattgatccaagaaatgaaacagaaattccggaagttgacctgaatacacacacacacacacacacacacacacacacacacacgaaggcgtgaaagactccatgaccctcaaggtataagatgcattttttttttttttttgagacagggtctcactctgtcacccagactgggtgcagtggtgtactatcccagctcagctctaccctccatccccccaacctcccccaaccaccctgagctcaagcaattctcatgcctcaaccctcagcctcatgagtaactgggactacaggcgtgcaccaccatgcgcagctaattttttgtatttttagtagagatgggtctaaccatattgcccaggctggtctcgaactcctgagctcaagcgatcctcttgcttcagcctcccaaagtgctggcattacagctgtgagccaccgcacctggccgcattcttctaaatcacagtacatctggctcccagtgcccaggctctcagggcagaaggtccagtgtgatcactttgcatggcctctctcccctcctgagcttgtgccagggccccagggctgacctggagaaggaaaatggcagagggtgaagatggggtgtctggtttggggaccatcctggccccccttgtcactgttgacatctcttctgcacagtggcattgctgggaggtgcttactgtgcctattcaaggggctggcagccgcagcctcactgcagatcagggacttggcttcccagttgaccacaggtccaagaacctgcagggtccagcctcccccccatccccagtcttccccaccctggcccggccctccaggtgcagaaacatgcaggcccctctccaggactgtgggaggagcgtgtccctcagactggcctgtgtcctggctcctcttaccacctcttccacaggttgtcacctgcagctgccccaggataaaggcaaggccagagaggactcctgaactcctgtgtgcctggggtggcaggggcaaacatagccaactggtggcctgagcggggccatggtgaggacacccttggtggcttgtcccacatcaagctgggaggtgacactgaggatgcattagtctgcagcgtatgataaaaacggcatttcaggccaggcgcggtggctcatgcctgtcaccccagcaccttgggaggccaaggtgagcagatcatatgaggtcaggactttgagaccagcctggccaacatggtgaaaactcatctctactaaaaaaacaaaaattatgtgggttggtggtgtgcgcctgtaatcccagctacttgggaggctgaggcaggagaatcacttaaacctgggaggcagaggctgcaacgagccgaaattgcaccactgcactccaggctgactccgtctcaaaaaaaaaaaaaaaaaaaaaggcatttcagttcaaatagggaaaggatacatctttctttcttttctctttctttctttctttctttctttctttctctttctttctttctttctttctttctttctttttctttcctcccttccttccttcctttctctctctctctctttctctcgttctctctttctttttgagatggagtttcactctcgctgcccaggctggagtacaatggcgtgatctcggcttattattattctccatgttggtcaggctggtcttgaactcccaacctcaggtgatccgcctgcgttggcctcccaaagtgctggtgtgagccactgcacccggcttaggatgcatttttcaatattttagtgtttgaataacgggctaacttgagaaaaaaataatttgaatcacacatcacaccaaaaataaattctaggtggattttaacactttcaaaaattattattattattagtttagagacagggtctcactccgtcgctcaggctggagtggagtggtatgatcatggttcactgcaaccttaaactcctggcctcatatgatcctccagcctcagcctctcaaaggactggaactacaaacatgcaccaccacgcccagcctaggtgggtttttaaaatccattcaagggcgggtgcagtggctcacacctgtaatcccagcattttgggaagccaaggtgggaggatcacttgagcccaggagttcgagaccggcctgggcaacatagtgagactacatctctacaaaaaatttaaaaatgagccaggcatggtggtgcacacctgtagtctctgctattcaggaggctgaggcgggatcattgtttgagcccaggagacagattgcagtgagctatgatggcaccactgcatggcagcctgggtgacaaagggagattcagtctcaaaaaaaaaaaaaaaa

SEQ ID NO: 646 - DNA, 149 bp, Homo sapiens
ggctgggtgcagtggctcacacctgtaatcccagcactttgggaggccgagacaggtggatcacctgaagtcaggagtttgagaccagcctggccaacatggtgaaaccctgtctctactaaaaatacaaaagttagccaggcgtggtg

SEQ ID NO: 647 - DNA, 8996 bp, Homo sapiens
gacggggtttggccatgttggccaggctggtctcgaactgctgacctcaggtgatccgcctgcctcggcctcccaaagtgctgggattacaggcgtattccactgtgcccagcctgagtttctgtttagaaacaacagtctatgatagtataatcctctcttttttgtacacagagtaaagaggacaaataggtgaaagaataaatgaaaggctggaatcccacttcccccgctgtcccagggcattggatattgacggataggaggcagcaaaccactcacagagccaggaagaaatgaaggcgttggtattgccaggaggggaagccggctcggctgaaatacgctatgaccatagcaaggagatactgatggagagaaaggaacacagagagggagaggtcacatcttggaagaggaagattgtggagagggggaatgagggtctggggaggggctgcccatcagagaagggacctcagtgttggggtgactgtactcatttggaaattgcgggatggaggggtattcgaaggtcggatgcaaatccgagaagccagaggaagggttttgggtgatgctcccaggatggtgggctccgatgggatctttggagggggtgtgtctaggttggctggtgtcaggagggtcttttgtgtgccaggcagagaactgtcccgaagagctgagagtagaggggccaggagcttcagggctgcggccagactgtggcccagagctcagatcccaaaggacccataggagaggcaggggccactcattcactctgcaagagaccagcagaatcctgagggagatgctgacaaatcataaaaagaccaagaatagccgggagtggcggctcaagcctgtgatcccagtactttttgagaggtggagacaggaggatcatgtgagcccaacagttcgagaacaacctgggcaacatagtgagaccctgtttccacaaacatttcaaaaattagttgagcatggtggcatgtgcctagtcccagctcctcaggaggctgaggaaagaagattgcttgagcccaggaattagaggctgcaatgagctatgatcatgccactgcactccatcctggggagcagagctagattctgtctcacaaaaaaaaaatttgtgggtgccaagactcaagaccatgggagctggtcgggcacagtggctgacgtctataatctcagcactttgggaggccaaggtgggtggattgcctgaggtcaggtgttcaggaccaacctggccaacatggcaaaaccccgtttctactaaaaacacaaaaattagccaggcgtggtggttcatgtctgtaatcccagctgcttggaggctgaggcaggagaatcgcttgaacccaggaggcatcggctgcagtgagtgaagatcgagacactgccctccagcctgggcaacagagcaagactctgtctcacacacacaaaaaaaaaaaaaaaaaaaagactgtaggagcatctggtgggaggtggtggagggagaactgtgggtttggaagctgcgccctccccccagccatgcgttggaacaggaacagttacatggagaacaaccttaccttgtccgacaccctcagatctttgtcccaggccaggaatcttttaatgacaggatcctctgtgattagagagcagatgtcagtgtgagaagcaggacagggtttccgtgggagcagcagggcagcgaggagaagtgtgcctcccggggggaagtctcaggattgtggccgcgggtgaggtggatgggagaggggagaatgactttcactgggcaagggagagaggctcctgctctgagactcccctgagaagaggccgaaggaggccctgggtgtgagaatctacaggatgtagagctgggaatcagccaggaccccctccagcagacacggagggaccactgcagagtcataaaggaattcccatcatttcctcatgagacagtcacacatcagggtgtgaccatggccttggtatcccccactatggatggagacacttaggtttagaaaagtcagtaagagacattaagtttcagagggcacagctgaaaccactttctttgtttattgattttgtttttctttatttgatttttatttttatttatttattaatttattttgagacagagtcttgctctgtgggccaggctggaatgcagtggcctgatcttggctcactgcaacctctgcctcccgggtttaagcgattctcctgtctcagcctcccgagtagctgggattacatgcatgagctactgtgcccagccttggtttttcttttgagacagggttttgctctgtcacccaggctggagtgcagtggtgtagtcatagctcactgcagcctcaaagtcctgagttcaagcaatcctcttgcctcagcctcccaacgtgctgggatctcaggcgggagccactgcgcctggcccgaaaccaagctttcttatcccaagcgctgacctttatcaagttgacctaatcctttatcatctcctaagtgtccctcatgagtgatcacttcacattcctcccacatggagagctcacccactggggcctatttttcccattggaaaagtgtggttattggaagtttcctgtttttggaaagaacaggattggaggtgctctctggggtgtcctcctaccaagcagcctgttgaaggcctcgtggtgctcagggagcacgagcgacactcgccgtcgcttcagcttcatcttgaggccacacagcatctccgccacccagatctcctcaggctcaggggcgagcaccttccgtggctcctcctccgactcctcagatttgtcccaccactccatcttccttttccagcaaaaggacctatgcggggggctgggatctaccccaggggctgagtaaagaaaccaggccacggtgtaatgcttctgcagttgatcacactagagcccgacccaaaaccccaaaccactctccatcctccccagcctcgcagactgctggcttctccaagccatctttccttctgtctgtctcctctgctgagctccatgtgccgctccttctcctccccattctcccgtttctctgtcctcagaacacttcctcatatccttccctggtccctggctctctgagtccctttttttttttttttttttttgttgttgttgttgagaaacagtcttgctttgtggcctaggctggagtgtagtggtgcgatcttggctcactgcaacctctgcctcctgggttccagtgattctcctgcctaagcctcccaagtagctgggattacaggtgcccaccagaacgcccagctcatttttgtgcttctagaagagacagggtttcaccatgttggccaggctggtctccaactcctggcctcaagtgatctgcctgcctggcctcccaaagtgctgggattacaggtgtgagccactgaaccctgcctcagtacctccattcttcccacacaccctcctcacgtgctccttcctgacttctgggcccgcccttccttcttttttttttttttttgagacagcgtctcactctctcacccagaatggaatgcagtggcactatcttggctcaaaacaacctcttccacctgggttcaagcgattatcctgtctcagcctcccgagtagctgggataacaggcatgcctggctaatttttgtatcgttagtataaatgacgtttcgctatattggtctggttggtctcgaacaactgacctcaagtgatccacccatctcagcctcccaaagtaatgggattacaggcatgagctaccacacccggccttcgtttttcttttgacacagggttttgctctgtcacccaggctggagtgcagtggtgcagtcatagctcactgcagcctcaaagtcctgagttcaagcagtcctcttgcctcagcctcccaacgtgctaggatctcaggcgtgagccactgcacctagcccgaaaccaagctttctcatcccaagcgccaacctttatcaagtctagcctagtcctctattgtctcctaagtgtccctcatgagtgatcacttctgagtcctcctgcgtggagatctcacccactgggggcgtatctttcccattggaaaagtgtggttattggaagtttcctctttttagaaagaacaggattggaggtgctctctggggtgtcctcctaccaagctgactgttgaagtccttgtggtgctcaaggaggatgggtgacactcgctgttgcttcagcttcatcttgagcccacacagcgtctccactacccaggtctcctcaggctcaggggcgagctccttctccggctcctcctcagattcatctgaccactccctcttccttttccagccaagggacctacatggggggctgggatctaccccaggggctgagtaaagaaaccaggccactgtgtaatgcttctgcatctgatcaccttagaccccgacccaaaaccccaaaccactctccatcctccccagactcgcagactgctgacttctctaagccatctttctgattttctcctctgctcaaccccatgtgccgctccttcccctccccattcttctctctctctgtcctccgaacgctgcttcatgtccttccctggtccctggctctctgagtccctccttttttgttttgttttgttttgttttgacacagaatcttgctttgtcacccaggttggagtgtagtggtgcaatctcagctcactgcaacatccatctcctggattccatttattcttctgcctcagcctctcaggtggctgggattacaggtgcctgccataatgcccagctcaattttgtacttttagtagagacagggtttcaccatgttggccaggctggtctcaaactcctggcctcaagtgatccgcctgccttggcctcccaaagttctggggttacaggtgtgagccaccgcacccagcctgaatttctccattcttcccacacaccctcctcaggttctccttcctgaccgctgacccttcttttcttttcttttcttttttttttttttggagtgcagtagcgtgatctcagctcactgcaacctcttcctcccagtctcaagtgattctcctgtctcagcctcctgagtagctgggattacaggtgtgcaccactaccacttggctaatttttatacttttagtagagatggggtttcaccatattggccaggctggccttgaactcctgacctcagatgatccgcccgcctcggcctcccaaagtgctggggttacaggcgtgagccaccgcacccggcccccttccttcgtcttagtcaatcctatcccacctcttcttccaccagtcccctcacctgatggtcccaacacttcatcatccaccacctcctggagggggtaccccgaggtgctccgctggggactctgctcattctggcggtgcggttgacggctggtcgtgatctttcccgtaatctgtcccctcttacggaacctagtctccgttctgtccatggccttcttctggacactgctaggatccagaagagtatgttatcaattctcaagcctaggagaagtcaggagtggagaacagctctgagaagatactgttgtccaactgatctccaggcaccacggagtccggtccctccaatcaggaaggtcggaatctctgatgtcatcgttcatgccaacctggcaaccagtttgaaaaaaaaacacatgtaactgccaggctgatctcttgtcctggagatcctgggtgaatggtatctcctgccactgtcccaacctcagaccattgtccaaaagcatcttcagggactccacatccctctgttccctgtcccagcagaggctgtgtcctctccactcaaagcctgaagcatgttggggtctcttcgtctctgtacgtgcccatttcagagtccagtctggtgggagagggaacagagtgggaaagaaaactagggtaagcagaaacgatgaaaccttataagagtgagattatcatgtacaagagtgagattatcatgtacaagagtgagattatcatgtacaagagatcccaggaatactgacttgatgaaaaagtcacatcagagcactcagtttggcagagcttttctgctgaatgtttactcacattcactgtccaagattctgtactgggggtacatacgtcctctgccctaaggcaattttgagtccaagagacattttgaggcctaaaaatcataggaaactgcccctgagctcacacatatttccaatggagctcacacatatttccaatggtgtccccaatttcagggaatccatggattacctaagccagcccctccagttcggctaagaaactctagtctatatatcaagttttgtatcatatgtattgctctgaactcagaaatttcccttccatttatggattctatgaataaaatatcacatgtacaaaaagactaagtcgaaaaatttcagctgtgcacagtggctcatgcttgtaatcccagcactttgggtggccaagggaggaagattgcctgaggccagcagttcaagaccagtataggcaacatagcaagagcccatctctaaaaaaacaaaaccaaaccaaattagccaggtgtggtggctggcacctgtgttccaactacttgggagactcatgtgacaggaagatcacttgagcccaggagttagaagctgcagtgagccatgatcttgccactgcactccagtctgggcaacacagcaagatactgtgtcaaaaaatttttttttgataaaaaataaaagagttacatgacattcagagaccatccaaaaaacctgcgggttcccggctgggctcagtggctcatgcctgtaatcccagcactttgggaggccaaagtgggtggatcacttgaggtcaggagtttgagaccagcctggacaacatggtgaaaccccatctctactaaaaatacaaaaaattagccaggcatggtggtggatacctgtaatcgcagctactcaggagagggcgctggagaatcacttgaactcatggtgcgcaggttgcagggagccaagatcgcaccattgtgctccagcctgggcaacaagagcaaaactccatctcaaaaaaaataaagaacctgcgagtgagttcccacacgttttcctgatgggctgctgctttcctaggagtctctcgctcatagaaaaggcacaaactgaaagaggaagcagatcccattgctgtggaagtcccattgttaggaagctctgcttttctggagttcaaattcgcattcatgacgctttaaaccgtcagagctgggtgggtcctcctacaacaaaatcgtttgctctctctctcctagttaacaggctttcaaatattagaagatcaatgttctgaccccattaaaatttctcttttgtggaatgaaaagctctgatttaacccatcttcaagcctggtttgatggaggaataggggctgagtcacctgcatttcccctccctgcacaaagtcctgggcccagatctggggtctgtctctgctgagggtggggtgaaccaggaagcacctccctctacatctccttgatgaatgggtataatggttgccatggaactggggcttgtttgatgacctggggctgggtgggcctctgagagcctttatagctgattgccttttgggagagggcaggtgggagccccaccctgtcttatgagtcaccccaaaggtgcatgggcaggcaggtgctggggaatcggctactccccagagcttggcgtggccatccctgtggcccctctgggagtctggagcccattccctcacactggtactctctgcagctggggacatctgcactaggaagacaggacacggcatggaagctggcctctgcccagaagccatgacattctggtcaccagcctgatgctataaaacgagtgtcacggccgggcatggtggctcacacctgtaatcccagcactttaggaggccaaggcgggtggatcatgaggtctggagttcgagaccagcctggccaacatggcgaaatcccgtctctactaaaaataagaacattagccaggtgtggtggcacatacctgtagtcccagctcctctggaggctgaggcaggagaatcacttaaacccaggaggcggagattgcagtgagccgagaccacggcattggactccaggctgggcaacagagcacgactccgtctcaaaaacaaaaaaaaacgagtgtcacctggggctacttggccagacacagagagcaaggagacatccctattatctgtcaaaaataattgttggggctgagcacagtggctcatgcctgtaatctcagcactttgggaggtcggagcaggaggacttgaggcctagagtttgagaccagcctgggcaacatagcgagcaccccatctccagaaaaaatttaaaaattggctgggcgcagtggctcatgcctgtaatcccagcactttgggaggccgagggggatgggtcatttgaggtcaggagtttgagaccagcctggccaacatggtgaaaccccatctctactaaaaatacaaaaattagccgggcatggtggtgggcacctgtaatcctagctacttgggaggctgaggcaggagaatcgcttgaacccaggaggcggaggttgtagtgagctaggatcatgccattgtactccagcctggacagcaaagctagactccatctcaaaaaaaaaaaaaagtaaaaaatttaaaaattagatgggcatggtgacatgtgcctgtaatccaggtactaaggaagctgaggtaggaggatgacttgagtctaggagttcgaggctgcagtgagctctgatcgcaccactgcactccagcctgagtgacacagcaagaccctgcttcaaaaaaaaaaaaaaa

SEQ ID NO: 648 - DNA, 14976 bp, Homo sapiens
gaggggccgcgcgcacgggaggacggagaggcggaaaggatggcgctgtgacagccgggccggagccctcgcgtccccaccccgcgccctggccgctgggcccggcggtgagtgcgcgcgggcgggggcggcggcggcgcggcccctcccccgggtcccgggcggctgggccgcggcagaggcgggggcgccgaggctgcgccgccgccgccgccgcctttgttgcgggcccgccggggaggcgggcggcgccggctctcgccgcccggcaggtgcgctggggccgggagggggccaggtggggaggcgggccgggcggagggggcagcggaagcgctcccggcgcggttccgcggagaaagggaaatggggcaagatggctggagaaatccgaacgcgcccgggggcgcggcggcggtggcgcaggcggggcagggcgggcggcggccctggttgcggcaccttagcgcggggaggcggcccctcccacctctgccccggagccggcagggagaccgccgccaagttcgggccccagctgcaggcatctgaagcctagacccatccatgccgcgttcgcctatcttttttggaaatatcgaaggaaccgactttgaactccagagggatcttttctttggaggttccccgatgcagccctcaagatgcatccgcactccacacctaggaattgcccgcgcccatagagggcaggagtgcggccctttgtactggccaagagtcagcgaatagagaatttgcagcccagaggcaatgggttatttccctgtcggggtgggccccagccgatttctgcacctttttgggtatccaggcataaccctcactatgtttcactgactcctgcgtttgcaaagtcccttaaggtagaatgaccctattttctgaaccagctcgtggacagaacctttgaatttggaaaatccaggcaatgggcctactgagccaaccgctccgcccatgcttaactggcttctagcacccattccagttgagtaagtgtccaatctgtgttcagacaccttcactgataggaaatcagcacctttcccctgcctctgattcctgtttgggtggcactggctgtgagaaagtactgcctttctcactgcttaaaaccttttccaggagtatttatccactggccggcctctgttctgccgtccagtctctacaaaccagtctgggttctcttccccagatagctttttaaatatttgaaggcagccagatacgttatctacccacagcctctcttatcataattaaacatgtcaccctgtagcttcctggccgactcttgtttccttacttccctccagcgggaacagtgcttggggctaaagaggtttgtatgtggctcagcctcccccatcataggctttggggaggtcacagtgacacctggtttttctgaacctgaatcttgcttgcagagatggagtccacagcctaccctctcaatttgagcctgaaagaagaggaagaggaagaagagattcagagccgggaactagaggacggcccggcagacatgcagaaagtacgaatctgctctgagggcggatgggtaagtaagaaggtgtggagtccacacagccagcagatgcaggcctgagagcccagcttgctttaagtctcctcctcagacagacgtgggaagtaaaaatagcccagcccggtgtgtttgcattcctgagaaaacagctctgtggctttaaaaggcagtgcaaagaatggaggaggtgttatggaaacagtccctcagccatgtagcttgtcatcgttcaattggaagtcctagaagccaggaccttgtctctctcgttcacccacttatcctgcactgcgtttgatgccaggcacattgtaggcaccaagtaaatgtttgttgacttactgctggttgaagggaaccattttaaataagactcgagtcattgggttgacatgagaggttaggctagttggttctgtgtgagcacctcttaccacagttgacacaggagagctgcctgtccagctgacctggatagaaatggtgggcagcagggaatacagagattcagggtatacacgcagaatagtatgatagaggtcggtttatacaaatgcaaatgcagtagatacttatagttacagatagttattcaccgtagttactggacttcgtggtaattaggcatgaatagtaaacattttaaataagcaacaaattgacattccttttctctgcttattttccgttgtgtataaacattgtcagtatacatagtatcctttgcttccatgaagagcccctatccatacaagcatggtacttctaaattgttccctaccagaggagagaactgggatgcagaaagattatctgccttgccctaaggttacacatgaacactgacatttgttcttcaaaacaggtctcctgagctgcacccttaaaagtaatgcattttaccatatgtatgctataccttaatttaaaaaaaaaaaaaacagtgcaaccacaggctctcagtttgccagtctagctgtggacaccgcgctgcctttgtctcatcagtgttctttgcccaccacatccttcttcccaattctgatccaagcaggcgtcaggtctatttagcctggaacaagaactcaaggcagtcaaaactcagggctttgaggctagattggtcaacccagaacatctaaatggagagccttggagaacaggtgcaatgaaagtgaatgttgggacagtgaggaaggagcaagatgaagaccaaccatgcttaggtgggaaaagaaggaagtaaccagaagggctggaggagggagtccagcagctggtggtgctggggattgggcatttgtggcctccaggcaatcagccatccatccacagttaccaagcacagtgctgggcgtaaagagagactcttttcctgatggaatttccagtcttgtgagcaaggcaggaaagtaaacataagtaatagtaagcacagtgtgcagagtgcagtggtggaagtctgcaaggatgcaccaggagccaagatgaggggatgcctcattcaggctgagaactccggggcttcctggacaaggcctaatcttgagcagtgagcaattttgcccccacccctggacatttggcaacatctagaaacactaccccctttccccacccctggatatttggcaatatctggaaacacttttgttggtctgacttggtgggggtgcgttggggactgggagatcctcctggcatctagtggatagaagccaggggagctgctagatatctacagtgcacaggatgcccccccaccaccacacacacacacacatacacacacaacaaagaggtaactggcccaaaatgtcagttgtgctgaggttgagaaaccctgctctagagcattagaagaaaagaatctgtttttaaaatatgtattttggttatagagaattatgttagggtgatcagtgaaagcttttcaagcataagaactatgataatatattaggataaaattccatagaattgaaatagaaatacaattttaagtagaaaaaataaaaaatgtgctttgaactgagtcttagtcattatggaatcagccaagggaagggaagggggttgcattccaggcaagaggacagcacaggcaaaagcactgaggagaggagcttgggtgcagagttaggagcagctcctgcagctggaacctgaaactcatggcagggagtggaaggggatcaggtataggaggccaggccaggggccagagccagccaggaggacatgcagtgctacgccagcgagtttgagctttctccttagctctgtggaatgaggccttagcccatctttctaagggaggcctcaggctctctacagccaccatgctaaggcctgagtggcctgctaagaaagcaaagctttggcatcagactttctagctctgtgaccttggacaagttacttaaccactctgtttccttacccataaaagtgaggtagtgatccccatgtccctagtttagcggattcagtgagagaatatatttatatgattgagtgtcctatacagtgcttggcccatagcaggcactccatcagtggatcagtacaaactaccccaaccccttcccccgagatccctgcgtctttgctgggtggctgcaaggctttagcgaggctgtgcaaggtgtaagcactttacaacatttaccctttgagatagcattggaatgccaacttcctgagcagagcaaggcagtgcacacaagctagaggaagaacacttatccagtgagcccttgatcttctgaggaaagggaggagggcagggactgaaggtccctacctgcaaggccaaggaggggtgtctggaggtggtacacagactgcctgacttctcagttttgcccggggccggccctgtttaccttctgctatgttgagccagataaaaggcctctgtggagcgaggggaggcctgcgcagcagggcctggctgaaggatcgctccattctcacagaggcttgctgtgaggagaatgtctaagccactacactgtgcctctggagcataatgtgggcttgtttgaagatcctccgtggctcagtcattaataggaagagatgaatcctgcaccagcccccagctttcttcctgcagcttcagggctcctggtacctgatgtttttaccaggcctagaatatgttaccccccctaagagtattgatggcccctctgaaatgacaggcatagacagtcctgttcccattttatcagcaaagggaaagggactataaataggtatgacctagatctggaacttcccagggagaaaaaaaggccaaagagacagttctttaaaagcctgggaattgggaaaggagtagggtggaaaattcctgggctgactggctttccagggtgaggaagtctgaggaaagcctgaagacgaatccattttacctcctcatatttcacacttagggatgtttgtccattcttactccaaagagtaggtttggttttatgacagataaaatttaatgattctttgaaacagttccaagtagaacaagagaagggaaatccagagatttgcctagatcgtatattcaaaagcacatttttcagtgactactagctacaggaagtgtcctcggcttagggaagcaaaaaggagtaagtacaggtcctgctttcaacaagctcagattctagtggagggagcagacaagtcaaccaaaagaattctgcagtgtgatgagtgccccgggagtgtggagcccaggacatttcagggacatgtgggtgtgctcacagcgtggcacagagtgggcttcctcgggagcagggattttgggctgagtcctggaagatgggtgggtgtcagccagaccaagaaaggggaggccctccaaggccaggggagaatatgggccaaggtgtgggggcgttggggaatggttgttcagggaactgcacacagctgagtacaagtggagcacagagctggggagagttgagggttagtcatcagggaggcagctgtgctcggtattgctggatccttggggtcaggcggtggtggccccaaaacgcaaccccaccatttattggctatgacattagcctggaaatgagacctctccaagcccatattctccttgattaagtaggggcatggtggcttgtgcctctaatcccagctactagggaggctgaggcaggagaatggcttgaactcaggaggcagaggttgcagtgagccaagatcgtgccactgcactccagcctgggcaacagagcaagactccatctcaaaaaaaaaaaaaaaaaataggcgtatctactcctccacaggcccattgcagggaataaatgaagcagttacaggccctttcctagtacgtgcttcctatgtatgaggtgctgtggaggtggggagagaacaagggggcttccttgggtcagggaggaaaggccaatgtatgtaagtgactgttggcctgacccctgaagtggctgcaggctatatagcatatggacactaattttctaagctaaggaaaaacagtatcataatcacccagacccaagatacagctttgggaaatagctttgaaggcaagaatacaaaataaccagcctgaaacaagccatccagtgccttcttatcactaaataggatgagctttggagtaggatttttaatgactgtaataagaaatacagttaaaaacaaaaagaggaggttggtttgggtggcttggctgccttgggctactgaggagccccctggtgctgggccaggaagcagaggaacaggggagggatgcagtcctttgggctttctgcctacctggtccaggatcaaagtgaatgagtttgctctggcatctcattacatatattaagctgtaattagcccttctttcttcctcttcatgctcttgtggattggaaaggccaaatagggccccttctctcagtggctcctccctgggcagctgtgggttccaagtctaacactttggttagtacccttggaaatgcagtgccctggaaacccacaaagatcccacggagggcagtgatcctattcagatttacaaacccaactcaccccgcccggggccgagggtctttttctggggtgggagggaattgggggtgcttgtgttggtgggacactttgtctgggtgtgggtggcttaagtcttgggtcagaggtgagccgtgagcagctctcaccacagtgcatgagggtgcgatgtcccatgtcctccaaccggtgatcatggtagggagttagttttcttctcaaagtgctgcttaccttatctgaactgagggtggcagctgctgtggtgggcacagaaggactgtgctcttgcccttgttggcttccagcagctgtatgaatgtggacagtccgttttcccctgggtcagggtccctcacctgacctgtgagaggacaggctgtgctgggctgtctgtaaggtcctgtccgctctgaaagtctgtctgcatatgcctgtttgtcattgtgaaagggctgttcactcttccaggtaccggccctatttgatgaggtggccatatatttttccgatgaggaatgggaagttttgacggagcaacaaaaggccctctaccgggaagtcatgaggatgaattatgaaactgtcctgtccctgggtaaagctgtgttttcctttgtctcctggaagctctgagcccagagaattgtttccatgcctctcttctctggtatatccaatgtccctctctcctgaacttagactctgcctcctcaatgtctgtgcccatttattccaatttttgatttgggcagtatatcaatattgtgtcaccctactcggcaatccgtgctgcctcagaactgcccccattcaacccaggcattcacatttaaggataaaaaccatgtaaccttagaaatgtcaccatggatctgggcctgtgcctcactgttccttacgagagaaggcaggcgttaatgttaccctgtcagcctcagaagtttggggacataccctcccaaagactgtttgctcctctccccaacttccaccccaaattgatatcacacatcttatcagcagaatgtaatcatttgaagagatttcccagtttgcttatacaggtaccaaaatgttaattggatcagcagctgcattcacccttctccctgctaaatgcagttcttttattgttggtgccaataccatccctcattaggagagatctacccattcctttagacagacctattttccattatcttttttctttaagtatccctgagcctttttccccttgtttttcacaaagaaggggagagtggctcttaagtattttgaagtacttattttggtagtgctccaggacagtaacacacagctgttacctattttatttcctataaacagaattcccattccctaagccagacatgatcacccgtttggaaggggaggaggagtctcagaattctgacgagtggcagctccaaggaggcacctctgcaggtactacaagtaaagcagttcagcgtccatccagctgggaacattgtggagtgggattttcagtgtacattccacggggtatttaagaggtagaaggattatgggttttggagttttgaaatctccctctttgcagtgctaaatgtgtgacagtgtgtgacaggcaactgcttttacctcagagcttccattcttcctctatcagctctgagtaacaagacttgatgtatgaccttgtttgtggatgaagcaaaatgaggcttgtgcagcatttggtctagtgcaccttctggctgaacagggctccctcagtggcgtaccatgtgcctctgcaaactaagaatagtgagaggaagcacacttcctgagttacctggctccctgtccatctcatactggatagaaaaagcaatagcaatcatagcatacatttgagcaaatgtatctaagaagtacctagtcctttgtcaagaaaaatggttattgaggccacagttgaataaatatagcattgcctccagacggccaaaatagttttatcttttctccggaagtaagagtttaaaatgccatatttcactgactctgagacatgtttttctcccattgctttactgtttctgaaattgagaatgcctcttaaaatcagtggcatgtcatagcttaattagtagtgttttctttcttaatggcacataatgatgcatcctacaactgatgacattttagtttgggtgagatagggtaatttccccaaatcatattcaacttctgtgaccaccttctaaatataaagtgaaacctggttgcaccattaatgtgcaagaactaattttctgccttataagcttaactttgctaagtgtggtttttgctgtaggttttcttggttctaaagggatatgattcaggccatgatgcatctctgtaatattatatggtagtatggttaacatttggcttctcattcacataaaaagtattttgatgcaaacatggcccccaaattatttggtccaagcttggttcctctgttgagttcccagctctgccactttctggcttggctaccttggtgcattatgtaacctctgtagcctccccttcttcatctgcaaagaaggaacagtgatacttagagttactctattaagagaactaggtgtgggtagtccacataaattggcatatggaaaaggacttaggcaatgttacctgttattaaagttactacttttggtgaacttcagattaaggtattcttagcatttcaacccccaaaaatcagggtataagccattttacttactggcattatttttgcccctcactatttgtctcccagaaaatgaagaatctgacgtaaagcctccagactggccaaacccaatgaatgctacctcccagtttcctcagcctcagcactttgacagctttggcctccgtctgcctcgggatatcacagagctgcccgagtggagtgaggggtaccccttctacatggccatgggcttcccagggtatgacctctcggctgatgacatagctgggaagtttcagttcagccggggcatgcgccgcagttacgacgcagggttcaagctgatggtagtggaatatgctgagagtaccaacaactgccaggctgccaagcagtttggagtattggaaaaaaacgttcgagactggcgcaaagtgaagccacagcttcaaaacgcccacgccatgcggcgggcattccgaggccccaagaatgggaggtttgctctggtggaccagcgtgtggccgaatatgtcagatacatgcaggccaaaggggaccccatcacccgggaggcgatgcagctgaaagctctcgaaatcgcccaggaaatgaacattccagagaaagggttcaaggcaagcttgggttggtgtcgaagaatgatgagaaggtatgacctgtctctgaggcataaagtgcccgtgccccagcacctgccggaagacctgactgagaaactcgtcacttaccagcgcagtgtcctggctctgcgcagggcgcatgactatgaggtagctcagatggggaatgcagatgagacgcccatttgtttagaggtgccatcacgggtaactgttgataaccagggcgaaaagcctgtcttggtcaagacaccaggcagggaaaaactgaaaatcacagcaatgcttggtgtcttggctgatgggaggaagttaccaccgtacatcattttgaggggaacatatatccccccggggaagtttcccagtgggatggaaattcgctgccaccggtatgggtggatgactgaagacttgatgcaggactggttggaagtggtgtggagacggaggacaggagcagtgcccaagcagcgagggatgctgatcttgaatggcttccggggccatgccacagattccgtgaagaactccatggaaagcatgaacactgacatggtgatcatcccagggggtctgacctcacagcttcaggtgctggatgtcgtggtctacaagccactgaatgacagtgtgcgggcccagtactccaactggcttctggctgggaacctggcgctgagcccaaccgggaatgctaagaagccacccctgggcctctttctggagtgggtcatggtcgcgtggaatagcatctcaagtgagtccatcgtccaagggttcaagaagtgccatatctccagcaacttggaggaggaagacgatgtcctgtgggaaatcgagagtgagttgccaggaggaggagaaccaccaaaagattgtgacaccgaaagcatggctgagagcaactgaagggaaagggaaaggtaaccactcaggagtagatactcagtgcctttgctgacatgtctgtgttctacaaacaccttctctccattatttttctgtttttaagttcccttagagcctacagtgcagtagtgtagatcaggggtccccaacccccaggtcacggaccatactggtccatggcctgtcaggaactgggctgcacagcaggaggtgagcggcaggtgagcaagcattaccacctgagctccgcccgctgtcacagcagcggcattagattctcataggagcacaaaccctgttgtgaactgcacatgtgagggatctaggttgcaggctcctcaatgcctgaggatctgaggcggaacagtttcatcccaaagccatcctaccacccactaccccgcacttcctgggtccctgcaaaaattgtcttccatgaaaccagtccctggtgccagaaaagttggggactgctggtatagataacagaccattagcattttctcctttatatgaaacatttattatttgatttatttgtgtctattttgctctgtggcttggacccagaaacacttgtataataggtgaaatgaacaaagaatgagctgccagaacatctgagagctgtaaagttaaaattatttggacccaaagaagcatagtctgacgttgttcagttcacacaaaattttgtctgaaaagccaacttttttctttcccttttaaattatgctgaacatttagggccagtatgtgtaactgacatgctgggacagttgtactcacttttgctggcctgtaggactgtgacatagggagaacactaagtgtgtcctccgggcctcgggtctcagtcctggagctatctacagtatgttaccagcgagtaagaataatagcttctacttgcttttccctacagagttcaggagttttaaaacgtcatcttagtctcattatgaccttcacatgggctatgacaataatttcctgtagtcagcagatgtctgaaggaagatattttttaactgaatctttacaccaaaaaaagaaaataaaacggtgcgtatctaggactctagtgagggctgaggacaataggcctggaattttctgggttgagtacacaagaagaacagctttcaaaggaaagtaggaatggaggcctaactgagacaacactagtgaaatgaccccacccacctacacctccagagaggaggaggatgagcatgtacagcaggggggacacccacaaagaacaaacaattcatttacctgttcgttctcatctccctaattataaattaaattgatcctccagacagtgttttatatgaaggaagaagccaccttttttacagaggacctgaaaccgtcaaccatcttcacacattctttttctttcttttaaagtataattaggtatttccatcttccttgcttttttctccaaatgaaatgctaatgggagccttattttacccacttcagctatataagtccatctgtgtttcaaagagtgacttatgtctcctgccttgcttccaaattaaattgtactcatattgctgaatcccattgtaattctgggatccctggaattacaatggagcaagaagttcttactattacattcaaaatcaccaaaattgcttttttttcccccttgggtcctccttgctttgagaaaccccatgaatccagcctcccttttctgctgacccttatattgcctgcattggatatcaaactgaattacattgagtttccatcttttcttcatttaccttttgcttttccctctccttgttagataacatttttgtgcacttttaatttcctaagctccttaccacctcagggacatgattaaaaacttccagaagaggaaaggagaaaaagctatgctaagttgcatttatgaatgttggcctgtaatattggtcatgagcttttgctcttctagtctgccacaattctctctgcagctcctgaggaagtgatgggagtagacagattcacagtgaacaagagatttgggagaccaagtgggcataaaactacgtcttggcctctatttggaaatctgaatgatggaattattatgtttgttaaaagttataccaaaaagccaagggttaattcatttaggttctctctgttttccagcaaatggaactctgatttaaacagctggggatgaaattcctcaagatgattattcctgaaagtgtggatgcgctggatgcgcagggaacatcaggaaaaggccacggggctctgaacagccccggtccagacagcagcctgtacatccatcccaggacacagcccagcccctccccacaccatacaaggtatcagaaaagtctaggacctatcatttcatcagagacatgatcagaaaagaaactgcttctgccccatttcttgttttggagattactccatctgtccatcaaaagaaacctgtaaatatgaaagaacaaaggttatttcctggagaaaagacaatttattcaacaccaacgagggactcatcatatgggcacaactctggtgtccttctatggagaaaacctcaagtaaagttttattctgcctttgaaaatgcttccaaaagtagaccctgtccccacacaggtcaagactacagagaaggctttgtagaaatgtgtcacctatgtacacctgctacttacacatttcctcttttggaaaaatgagatacttagaataacaagaaaattaagacatactggcctggtgccagcagatggcttttctatagacaaactaggttagtgtggaagatataggttaaaataaactatgctgttttatttatcttcccaacctgattggcagctagacttttttagggtctcatttaatggccctgtttttttcattattatatttaatgatagggcaggatttcgtatgcaagctcttgtttctcaggctgcctgcagaagaagtcgctataaattatctgttgtctacatggtacaaggcccattgactcatctgatgcttgttttgttaatttctttaatatttttatcacggggcagtgggagggcttgggcttttagccacagctgttttaagacttctgatctcctgccctgcaggaataggtgggaagtcattgaatttttacactatagtaatttgcattcccacataagtttgagtgttacgaaaacattcctttaaagggatctgtgctacacaaaatatgccaggacctcacagacaaagccattgctagaaatgtcattccaatgatcagatctggaaacaggctgccataaccacttttccttcttgtagactcagctcacctgtatatttaaactgttcttggcatcttgaaacacctatttctactcaggtactcattgtcctgttactgattcacctttctgatccttttcaaccagttttcccccaaggggggaaattttacttaacctctagtatttgaacaactcaatatttgaattgttgccccatttgcttttacctgtactgtattcttggtcatctcaaatggcgtctaaacccagctactttgcattccagaagtttccattccctccaattccacctaatttttcatctgtcctagttactggctctttcttcatgtcttatttctcttgctttgggagcttaaaagattttacaagacctaattttgggttccttccttggagccatagttaccctgccaagaagagtagaaaatgggttcaactcctgtttcgctccaccaacacctctgtgagtctcatcatcagctgagcgatgatgccttacaggttgcatagcactggaactttcctagagtaacggctctgctgccagggtttctctgggctcattcttccactgacttaattatgatctatgcctaacagagccccagtacaactattttgcagaatggctgttaccctagaattactatagcacatattgagatatagttgtactccctagtagataggaactgaccccaacaataaactttgataataaagacaata

SEQ ID NO: 649 - DNA, 720 bp, Homo sapiens
gtcttccagcattctatggtcccaccaggtgggtaggtgactaggaattcaggccaggtcctagagagtagtgagaagttttccagtttgcagtttcctctgtgctgtatgtacagccatacagcctatggaacctgacattgcagtgggcagcaggacacggtcaaggctcctagctgcctctccatctatggaactatgaaatttcacacatattccctaggcagcattaaggcccaggtatattgagtagtccaaaccaaaaaactatattcgagtatcagtttaaattcttccaagccctaaaaattcttacgtagtttctcacctaaaactaatggcttgtgccaagaactgaaactaagctattgatttttttttaagaagtcttaatctatacataagaaattacatacctggccaggtgcagtagttcaggcctgtaatcctaacaaacactctgggaggccaaggtgggcagactgcttgagctcaggagttcattaccagtctgggcaacatgataaaaccgtgtctttacaaaaaaaaaaaattttaaattagccgggcatggtggtgtgaatctgtagtcccagctacttaggaggttgcgatgggagaatcacctgagcccagaggtccagtctgcagtgagccatgatcacaccacagcactccagctggggtgacagagtgagaccctatctcaaaaagaaaaga

SEQ ID NO: 650 - DNA, 3126 bp, Homo sapiens
cttggcaatgtattaaacagcaggccttggagactagcacttgagttaacacagccaccacaaccaccactgccatcatcaccttcccggaaagcagccacctgtctggctcctggctttgtccagctgccaacctaaggcatgtgcctacgcaggaggcgatgacattttggctccacgttcaaagttgttttttttttcctttctcatgtgttatttctaaagataacaaaggtcaaaaggcatccagcgttttctggtttctcataagcttctggtcaatatttaatctggtttatggattttttttaggtcttctagatgccttcttgaggctgcttgtggccacccacagacacttgtaaggaggagagaagtcagcctggcagagagactctgaaatgagggattagaggtgttcaaggagcaagagcttcagcctgaagacaagggagcagtccctgaagacgcttctactgagaggtctgccatggcctctcttggcctccaacttgtgggctacatcctaggccttctggggcttttgggcacactggttgccatgctgctccccagctggaaaacaagttcttatgtcggtgccagcattgtgacagcagttggcttctccaagggcctctggatggaatgtgccacacacagcacaggcatcacccagtgtgacatctatagcacccttctgggcctgcccgctgacatccaggctgcccaggccatgatggtgacatccagtgcaatctcctccctggcctgcattatctctgtggtgggcatgagatgcacagtcttctgccaggaatcccgagccaaagacagagtggcggtagcaggtggagtctttttcatccttggaggcctcctgggattcattcctgttgcctggaatcttcatgggatcctacgggacttctactcaccactggtgcctgacagcatgaaatttgagattggagaggctctttacttgggcattatttcttccctgttctccctgatagctggaatcatcctctgcttttcctgctcatcccagagaaatcgctccaactactacgatgcctaccaagcccaacctcttgccacaaggagctctccaaggcctggtcaacctcccaaagtcaagagtgagttcaattcctacagcctgacagggtatgtgtgaagaaccaggggccagagctggggggtggctgggtctgtgaaaaacagtggacagcaccccgagggccacaggtgagggacactaccactggatcgtgtcagaaggtgctgctgaggatagactgactttggccattggattgagcaaaggcagaaatgggggctagtgtaacagcatgcaggttgaattgccaaggatgctcgccatgccagcctttctgttttcctcaccttgctgctcccctgccctaagtccccaaccctcaacttgaaaccccattcccttaagccaggactcagaggatccctttgccctctggtttacctgggactccatccccaaacccactaatcacatcccactgactgaccctctgtgatcaaagaccctctctctggctgaggttggctcttagctcattgctggggatgggaaggagaagcagtggcttttgtgggcattgctctaacctacttctcaagcttccctccaaagaaactgattggccctggaacctccatcccactcttgttatgactccacagtgtccagactaatttgtgcatgaactgaaataaaaccatcctacggtatccagggaacagaaagcaggatgcaggatgggaggacaggaaggcagcctgggacatttaaaaaaataaaaatgaaaaaaaaacccagaacccatttctcagggcactttccagaattctctcatatttgtgggctgggatcaagcctgcagcttgaggaaagcacaaggaaaggaaagaagatctggtggaaagctcaggtggcagcggactctgactccactgaggaactgcctcagaagctgcgatcacaactttggctgaagcccctgcctcactctagggcacctgacctggcctcttgcctaaaccacaaggctaagggctatagacaatggtttccttaggaacagtaaaccagtttttctagggatggcccttggctgggggatgacagtgtgggagctgtggggtactgaggaagacaccattccttgacggtgtctaagaagccaggtggatgtgtgtggtggctccagtgggtgtttctactctgccagtgagaggcagccccctagaaactcttcaggcgtaatggaaaatcagctcaaatgagatcaggcccccccagggtccacccacagagcactacagagcctctgaaagaccatagcaccaagcgagccccttcagattcccccactgtccatcggaagatgctccagagtggctagagggcatctaagggctccagcatggcatatccatgcccacggtgctgtgtccatgatctgagtgatagctgcactgctgcctgggattgcagctgaggtgggagtggagaatggttcccaggaagacagttccacctctaaggtccgaaaatgttccctttaccctggagtgggagtgaggggtcatacaccaaaggtattttccctcaccagtctaggcatgactggcttctgaaaaattccagcacacctcctcgaacctcattgtcagcagagagggcccatctgttgtctgtaacatgcctttcacatgtccaccttcttgccatgttccagctgctctcccaacctggaaggccgtctccccttagccaagtcctcctcaggcttggagaacttcctcagcgtcacctccttcattgagccttctttccccactccatccctctcctacccctccctcccccaaccctcaatgtataaattgcttcttgatgcttagcattcacaatttttgattgatcgttatttgtgtgtgtgtgtccgatctcacaagtatattgtaaacccttcggtgggtgggggccatatcctagacctctctgtatcccccagactatctgtaacagtgccaggcacacagtaggtgatcaataaacacttgttgattgagtaa
